(19) United States
(12) Patent Application Publication
(10) Pub. No.: US 2023/0056182 A1
(43) Pub. Date: Feb. 23, 2023

(54) USE OF ADENO-ASSOCIATED VIRAL VECTORS TO CORRECT GENE DEFECTS/ EXPRESS PROTEINS IN HAIR CELLS AND SUPPORTING CELLS IN THE INNER EAR

(71) Applicant: Akouos, Inc., Boston, MA (US)

(72) Inventors: Emmanuel John Simons, Brookline, MA (US); Robert Ng, Newton, MA (US); Danielle R. Lenz, Brookline, MA (US); Michelle Valero, Revere, MA (US)

(21) Appl. No.: 17/291,931

(22) PCT Filed: Nov. 7, 2019
(86) PCT No.: PCT/US2019/060328

§ 371 Date: May 6, 2021

Related U.S. Application Data
(60) Provisional application No. 62/756,953, filed on Nov. 7, 2018.
(60) Provisional application No. 62/888,093, filed on Aug. 16, 2019.

(51) Int. Cl. A61K 48/00; A61P 27/16; C12N 15/86

(52) U.S. Cl. CPC A61K 48/0075; C12N 15/86; A61P 27/16

(57) ABSTRACT

Provided herein are compositions that include at least two different nucleic acid vectors that, when introduced into a primate cell, the at least two different vectors undergo con catamerization or homologous recombination with each other, thereby forming a recombined nucleic acid that encodes a full-length target protein (e.g., a supporting cell target protein or a hair cell target protein). Also provided are compositions that include a single AAV vector that, when introduced into a primate cell, a nucleic acid encoding a full-length target protein (e.g., a supporting cell target protein or a hair cell target protein) is generated at the locus of the supporting cell target gene, and the primate expresses the target protein (e.g., a supporting cell target protein or a hair cell target protein).

### CROSS-REFERENCE TO RELATED APPLICATIONS

[0001] This application claims priority to U.S. Provisional Patent Application Ser. No. 62/756,953, filed Nov. 7, 2018, and U.S. Provisional Patent Application Ser. No. 62/888,093, filed Aug. 16, 2019; the entire contents of which are herein incorporated by reference.

### TECHNICAL FIELD

[0002] The present disclosure relates generally to the use of nucleic acids to treat hearing loss in a primate.

### BACKGROUND OF THE INVENTION

[0003] Hearing loss can be conductive (arising from the ear canal or middle ear), sensorineural (arising from the inner ear or auditory nerve), or mixed. Most forms of non-syndromic deafness are associated with permanent hearing loss caused by damage to structures in the inner ear (sensorineural deafness), although some forms may involve changes in the middle ear (conductive hearing loss). The great majority of human sensorineural hearing loss is caused by abnormalities in the hair cells of the organ of Corti in the cochlea (poor hair cell function). The hair cells may be abnormal at birth, or may be damaged during the lifetime of an individual (e.g., as a result of noise trauma or infection).

### SUMMARY

[0004] The present invention is based on the discovery that a composition including at least two different nucleic acid vectors, wherein: each of the at least two different adeno-associated virus (AAV) vectors includes a coding sequence that encodes a different portion of a supporting cell target protein, each of the encoded portions being at least 30 amino acid residues in length, wherein the amino acid sequence of each of the encoded portions may optionally partially overlap with the amino acid sequence of a different one of the encoded portions; no single vector of the at least two different vectors encodes the full-length supporting cell target protein; at least one of the coding sequences includes a nucleotide sequence spanning two neighboring exons of the supporting cell target genomic DNA, and lacks an intronic sequence between the two neighboring exons; and when introduced into a primate cell the at least two different vectors undergo concatamerization or homologous recombination with each other, thereby forming a recombined nucleic acid that encodes a full-length supporting cell target protein.

[0005] Provided herein are compositions that include at least two different nucleic acid vectors, where: each of the at least two different adeno-associated virus (AAV) vectors includes a coding sequence that encodes a different portion of a supporting cell target protein, each of the encoded portions being at least 30 amino acid residues in length, where the amino acid sequence of each of the encoded portions may optionally partially overlap with the amino acid sequence of a different one of the encoded portions; no single vector of the at least two different vectors encodes the full-length supporting cell target protein; at least one of the coding sequences includes a nucleotide sequence spanning two neighboring exons of the supporting cell target genomic DNA, and lacks an intronic sequence between the two neighboring exons; and when introduced into a primate cell the at least two different vectors undergo concatamerization or homologous recombination with each other, thereby forming a recombined nucleic acid that encodes a full-length supporting cell target protein.

[0006] In some embodiments of any of the compositions described herein, the amino acid sequence of one of the encoded portions overlaps with the amino acid sequence of a different one of the encoded portions. In some embodiments of any of the compositions described herein, the amino acid sequence of each of the encoded portions partially overlaps with the amino acid sequence of a different encoded portion. In some embodiments of any of the compositions described herein, the overlapping amino acid sequence is between 30 amino acid residues to about 390 amino acid residues in length.

[0007] In some embodiments of any of the compositions described herein, each of the at least two different vectors includes a different segment of an intron, where the intron includes the nucleotide sequence of an intron that is present in a supporting cell target genomic DNA, and where the two different segments overlap in sequence by at least 100 nucleotides. In some embodiments of any of the compositions described herein, the two different segments overlap in sequence by about 30 nucleotides to about 390 nucleotides. In some embodiments of any of the compositions described herein, the nucleotide sequence of each of the at least two different vectors is between about 30 nucleotides to about 390 nucleotides in length. In some embodiments of any of the compositions described herein, the nucleotide sequence of each of the at least two different vectors is between 30 nucleotides to 340 nucleotides in length.

[0008] In some embodiments of any of the compositions described herein, the number of different vectors in the composition is two. In some embodiments of any of the compositions described herein, a first of the two different vectors includes a coding sequence that encodes an N-terminal portion of the supporting cell target protein. In some embodiments of any of the compositions described herein, the N-terminal portion of the supporting cell target protein is between about 30 amino acids to about 390 amino acids in length. In some embodiments of any of the compositions described herein, the N-terminal portion of the supporting cell target protein is between about 30 amino acids to about 340 amino acids in length. In some embodiments of any of the compositions described herein, the first vector further includes one or both of a promoter and a Kozak sequence. In some embodiments of any of the compositions described herein, the first vector includes a promoter that is an inducible promoter, a constitutive promoter, or a tissue-specific promoter.

[0009] In some embodiments of any of the compositions described herein, the second of the two different vectors includes a coding sequence that encodes a C-terminal portion of the supporting cell target protein. In some embodiments of any of the compositions described herein, the C-terminal portion of the supporting cell target protein is between 30 amino acids to about 390 amino acids in length. In some embodiments of any of the compositions described herein, the C-terminal portion of the supporting cell target protein is between 30 amino acids to about 340 amino acids in length. In some embodiments of any of the compositions described herein, the second vector further includes a poly(dA) sequence.

[0010] Also provided herein are compositions that include two different nucleic acid vectors, where: a first nucleic acid vector of the two different nucleic acid vectors includes a promoter, a first coding sequence that encodes an N-terminal portion of a supporting cell target protein positioned 3′ of the promoter, and a splicing donor signal sequence positioned at the 3′ end of the first coding sequence; and a second nucleic acid vector of the two different nucleic acid vectors includes a splicing acceptor signal sequence, a second coding sequence that encodes a C-terminal portion of a supporting cell target protein positioned at the 3′ end of the splicing acceptor signal sequence, and a polyadenylation sequence at the 3′ end of the second coding sequence; where each of the encoded portions is at least 30 amino acid residues in length, where the amino acid sequences of the encoded portions do not overlap, where no single vector of the two different vectors encodes the full-length supporting cell target protein, and, when the coding sequences are transcribed in a primate cell, to produce RNA transcripts, splicing occurs between the splicing donor signal sequence on one transcript and the splicing acceptor signal sequence on the other transcript, thereby forming a recombined RNA molecule that encodes a full-length supporting cell target protein.

[0011] In some embodiments of any of the compositions described herein, at least one of the coding sequences includes a nucleotide sequence spanning two neighboring exons of a supporting cell target genomic DNA, and lacks an intronic sequence between the neighboring exons.

[0012] Also provided herein are compositions that include: a first nucleic acid vector including a promoter, a first coding sequence that encodes an N-terminal portion of a supporting cell target protein positioned 3′ of the promoter, a splicing donor signal sequence positioned at the 3′ end of the first coding sequence, and a first detectable marker gene positioned 3′ of the splicing donor signal sequence; and a second nucleic acid vector, different from the first nucleic acid vector, including a second detectable marker gene, a splicing acceptor signal sequence positioned 3′ of the second detectable marker gene, a second coding sequence that encodes a C-terminal portion of a supporting cell target protein positioned at the 3′ end of the splicing acceptor signal sequence, and a polyadenylation sequence positioned at the 3′ end of the second coding sequence; where each of the encoded portions is at least 30 amino acid residues in length, where the respective amino acid sequences of the encoded portions do not overlap with each other, where no single vector of the two different vectors encodes the full-length supporting cell target protein, and, when the coding sequences are transcribed in a primate cell to produce RNA transcripts, splicing occurs between the splicing donor signal on one transcript and the splicing acceptor signal on the other transcript, thereby forming a recombined RNA molecule that encodes a full-length supporting cell target protein.

[0013] In some embodiments of any of the compositions described herein, at least one of the coding sequences includes a nucleotide sequence spanning two neighboring exons of a supporting cell target genomic DNA, and lacks an intronic sequence between the neighboring exons. In some embodiments of any of the compositions described herein, the first or second detectable marker gene is alkaline phosphatase. In some embodiments of any of the compositions described herein, the first and second detectable marker genes are the same.

[0014] Also provided herein are compositions that include: a first nucleic acid vector including a promoter, a first coding sequence that encodes an N-terminal portion of a supporting cell target protein positioned 3′ to the promoter, a splicing donor signal sequence positioned at the 3′ end of the first coding sequence, and a F1 phage recombinogenic region positioned 3′ to the splicing donor signal sequence; and a second nucleic acid vector, different from the first nucleic acid vector, including a second F1 phage recombinogenic region, a splicing acceptor signal sequence positioned 3′ of the second F1 phage recombinogenic region, a second coding sequence that encodes a C-terminal portion of a supporting cell target protein positioned at the 3′ end of the splicing acceptor signal sequence, and a polyadenylation sequence positioned at the 3′ end of the second coding sequence; where each of the encoded portions is at least 30 amino acid residues in length, where the respective amino acid sequences of the encoded portions do not overlap with each other, where no single vector of the two different vectors encodes the full-length supporting cell target protein, and, when the coding sequences are transcribed in a primate cell to produce RNA transcripts, splicing occurs between the splicing donor signal one transcript and the splicing acceptor signal on the other transcript, thereby forming a recombined RNA molecule that encodes a full-length supporting cell target protein.

[0015] In some embodiments of any of the compositions described herein, at least one of the coding sequences includes a nucleotide sequence spanning two neighboring exons of a supporting cell target genomic DNA, and lacks an intronic sequence between the two neighboring exons.

[0016] Also provided herein are compositions that include a single adeno-associated virus (AAV) vector, where the single AAV vector that includes a nucleic acid sequence that encodes a supporting cell target protein; and when introduced into a primate cell, a nucleic acid encoding a full-length supporting cell target protein is generated at the locus of the supporting cell target gene, and the primate expresses the supporting cell target protein.

[0017] In some embodiments of any of the compositions described herein, the supporting cell target gene is gap junction protein beta 2 (GJB2). In some embodiments of any of the compositions described herein, the supporting cell target gene is solute carrier family 26 member 4 (SLC26A4).

[0018] In some embodiments of any of the compositions described herein, the composition further includes a pharmaceutically acceptable excipient.

[0019] In some embodiments of any of the compositions described herein, the second nucleic acid vector further includes a destabilizing sequence.

[0020] In some embodiments of any of the compositions described herein, the second nucleic acid vector further includes a FKBP12 destabilizing sequence.

[0021] Also provided herein are kits including any of the compositions described herein. In some embodiments of any of the kits described herein, the kit further includes a pre-loaded syringe containing the composition.

[0022] Also provided herein are methods of correcting a supporting cell target gene defect in a supporting cell of an inner ear in a primate that include: administering to the inner ear of the primate a therapeutically effective amount of any of the compositions described herein, where the administering repairs the supporting cell target gene defect in the supporting cell of the inner ear of the primate.

[0023] Also provided herein are methods of increasing the expression level of a supporting cell target protein in a supporting cell of an inner ear of a primate that include: administering to the inner ear of the primate a therapeutically effective amount of any of the compositions described herein, where the administering results in an increase in the expression level of the supporting cell target protein in the supporting cell of the inner ear of the primate.

[0024] In some embodiments of any of the methods described herein, the primate has previously been determined to have a defective supporting cell target gene.

[0025] Also provided herein are methods of treating non-syndromic sensorineural hearing loss in a primate identified as having a defective supporting cell target gene that include: administering to the inner ear of the primate a therapeutically effective amount of any of the compositions described herein.

[0026] In some embodiments of any of the methods described herein, the method further includes, prior to the administering step, determining that the primate has a defective supporting cell target gene.

[0027] Also provided herein are methods of restoring hearing in a primate identified or diagnosed as having hearing loss that include: administering to the inner ear of the primate a therapeutically effective amount of any composition described herein.

[0028] In some embodiments of any of the methods described herein, the method further includes prior to the administering step, determining that the primate has a defective supporting cell target gene.

[0029] Also provided herein are methods of restoring synapses and/or preserving spiral ganglion nerves in a primate identified or diagnosed as having an inner ear disorder that include: administering to the inner ear of the primate a therapeutically effective amount of any composition described herein.

[0030] In some embodiments of any of the methods described herein, the method further includes prior to the administering step, determining that the primate has a defective supporting cell target gene.

[0031] Also provided herein are methods including administering to an inner ear of a primate a therapeutically effective amount of any composition described herein.

[0032] In some embodiments of any of the methods described herein, the primate has been previously identified as having a defective supporting cell target gene.

[0033] Also provided herein are compositions including at least two different nucleic acid vectors, wherein: each of the at least two different adeno-associated virus (AAV) vectors includes a coding sequence that encodes a different portion of a hair cell target protein, each of the encoded portions being at least 30 amino acid residues in length, wherein the amino acid sequence of each of the encoded portions may optionally partially overlap with the amino acid sequence of a different one of the encoded portions; no single vector of the at least two different vectors encodes the full-length hair cell target protein; at least one of the coding sequences includes a nucleotide sequence spanning two neighboring exons of the hair cell target genomic DNA, and lacks an intronic sequence between the two neighboring exons; and when introduced into a primate cell the at least two different vectors undergo concatamerization or homologous recombination with each other, thereby forming a recombined nucleic acid that encodes a full-length hair cell target protein.

[0034] Provided herein are compositions that include at least two different nucleic acid vectors, where: each of the at least two different adeno-associated virus (AAV) vectors includes a coding sequence that encodes a different portion of a hair cell target protein, each of the encoded portions being at least 30 amino acid residues in length, where the amino acid sequence of each of the encoded portions may optionally partially overlap with the amino acid sequence of a different one of the encoded portions; no single vector of the at least two different vectors encodes the full-length protein; at least one of the coding sequences includes a nucleotide sequence spanning two neighboring exons of the hair cell target genomic DNA, and lacks an intronic sequence between the two neighboring exons; and when introduced into a primate cell the at least two different vectors undergo concatamerization or homologous recombination with each other, thereby forming a recombined nucleic acid that encodes a full-length hair cell target protein.

[0035] In some embodiments of any of the compositions described herein, the amino acid sequence of one of the encoded portions overlaps with the amino acid sequence of a different one of the encoded portions. In some embodiments of any of the compositions described herein, the amino acid sequence of each of the encoded portions partially overlaps with the amino acid sequence of a different encoded portion. In some embodiments of any of the compositions described herein, the overlapping amino acid sequence is between 30 amino acid residues to about 390 amino acid residues in length.

[0036] In some embodiments of any of the compositions described herein, each of the at least two different vectors includes a different segment of an intron, where the intron includes the nucleotide sequence of an intron that is present in a hair cell target genomic DNA, and where the two different segments overlap in sequence by at least 100 nucleotides. In some embodiments of any of the compositions described herein, the two different segments overlap in sequence by about 30 nucleotides to about 390 nucleotides. In some embodiments of any of the compositions described herein, the nucleotide sequence of each of the at least two different vectors is between about 30 nucleotides to about 390 nucleotides in length. In some embodiments of any of the compositions described herein, the nucleotide sequence of each of the at least two different vectors is between 30 nucleotides to 340 nucleotides in length.

[0037] In some embodiments of any of the compositions described herein, the number of different vectors in the composition is two. In some embodiments of any of the compositions described herein, a first of the two different vectors includes a coding sequence that encodes an N-terminal portion of the hair cell target protein. In some embodiments of any of the compositions described herein, the N-terminal portion of the hair cell target protein is between about 30 amino acids to about 390 amino acids in length. In some embodiments of any of the compositions described herein, the N-terminal portion of the hair cell target protein is between about 30 amino acids to about 340 amino acids in length. In some embodiments of any of the compositions described herein, the first vector further includes one or both of a promoter and a Kozak sequence. In some embodiments of any of the compositions described herein, the first vector includes a promoter that is an inducible promoter, a constitutive promoter, or a tissue-specific promoter.

[0038] In some embodiments of any of the compositions described herein, the second of the two different vectors includes a coding sequence that encodes a C-terminal portion of the hair cell target protein. In some embodiments of any of the compositions described herein, the C-terminal portion of the hair cell target protein is between 30 amino acids to about 390 amino acids in length. In some embodiments of any of the compositions described herein, the C-terminal portion of the hair cell target protein is between 30 amino acids to about 340 amino acids in length. In some embodiments of any of the compositions described herein, the second vector further includes a poly(dA) sequence.

[0039] Also provided herein are compositions that include two different nucleic acid vectors, where: a first nucleic acid vector of the two different nucleic acid vectors includes a promoter, a first coding sequence that encodes an N-terminal portion of a hair cell target protein positioned 3′ of the promoter, and a splicing donor signal sequence positioned at the 3′ end of the first coding sequence; and a second nucleic acid vector of the two different nucleic acid vectors includes a splicing acceptor signal sequence, a second coding sequence that encodes a C-terminal portion of a hair cell target protein positioned at the 3′ end of the splicing acceptor signal sequence, and a polyadenylation sequence at the 3′ end of the second coding sequence; where each of the encoded portions is at least 30 amino acid residues in length, where the amino acid sequences of the encoded portions do not overlap, where no single vector of the two different vectors encodes the full-length hair cell target protein, and, when the coding sequences are transcribed in a primate cell, to produce RNA transcripts, splicing occurs between the splicing donor signal sequence on one transcript and the splicing acceptor signal sequence on the other transcript, thereby forming a recombined RNA molecule that encodes a full-length hair cell target protein.

[0040] In some embodiments of any of the compositions described herein, at least one of the coding sequences includes a nucleotide sequence spanning two neighboring exons of a hair cell target genomic DNA, and lacks an intronic sequence between the neighboring exons.

[0041] Also provided herein are compositions that include: a first nucleic acid vector including a promoter, a first coding sequence that encodes an N-terminal portion of a hair cell target protein positioned 3′ of the promoter, a splicing donor signal sequence positioned at the 3′ end of the first coding sequence, and a first detectable marker gene positioned 3′ of the splicing donor signal sequence; and a second nucleic acid vector, different from the first nucleic acid vector, including a second detectable marker gene, a splicing acceptor signal sequence positioned 3′ of the second detectable marker gene, a second coding sequence that encodes a C-terminal portion of a hair cell target protein positioned at the 3′ end of the splicing acceptor signal sequence, and a polyadenylation sequence positioned at the 3′ end of the second coding sequence; where each of the encoded portions is at least 30 amino acid residues in length, where the respective amino acid sequences of the encoded portions do not overlap with each other, where no single vector of the two different vectors encodes the full-length hair cell target protein, and, when the coding sequences are transcribed in a primate cell to produce RNA transcripts, splicing occurs between the splicing donor signal on one transcript and the splicing acceptor signal on the other transcript, thereby forming a recombined RNA molecule that encodes a full-length hair cell target protein.

[0042] In some embodiments of any of the compositions described herein, at least one of the coding sequences includes a nucleotide sequence spanning two neighboring exons of a hair cell target genomic DNA, and lacks an intronic sequence between the neighboring exons. In some embodiments of any of the compositions described herein, the first or second detectable marker gene is alkaline phosphatase. In some embodiments of any of the compositions described herein, the first and second detectable marker genes are the same.

[0043] Also provided herein are compositions that include: a first nucleic acid vector including a promoter, a first coding sequence that encodes an N-terminal portion of a hair cell target protein positioned 3′ to the promoter, a splicing donor signal sequence positioned at the 3′ end of the first coding sequence, and a F1 phage recombinogenic region positioned 3′ to the splicing donor signal sequence; and a second nucleic acid vector, different from the first nucleic acid vector, including a second F1 phage recombinogenic region, a splicing acceptor signal sequence positioned 3′ of the second F1 phage recombinogenic region, a second coding sequence that encodes a C-terminal portion of a hair cell target protein positioned at the 3′ end of the splicing acceptor signal sequence, and a polyadenylation sequence positioned at the 3′ end of the second coding sequence; where each of the encoded portions is at least 30 amino acid residues in length, where the respective amino acid sequences of the encoded portions do not overlap with each other, where no single vector of the two different vectors encodes the full-length hair cell target protein, and, when the coding sequences are transcribed in a primate cell to produce RNA transcripts, splicing occurs between the splicing donor signal one transcript and the splicing acceptor signal on the other transcript, thereby forming a recombined RNA molecule that encodes a full-length hair cell target protein.

[0044] In some embodiments of any of the compositions described herein, at least one of the coding sequences includes a nucleotide sequence spanning two neighboring exons of a hair cell target genomic DNA, and lacks an intronic sequence between the two neighboring exons.

[0045] Also provided herein are compositions that include a single adeno-associated virus (AAV) vector, where the single AAV vector that includes a nucleic acid sequence that encodes a hair cell target protein; and when introduced into a primate cell, a nucleic acid encoding a full-length hair cell target protein is generated at the locus of the hair cell target gene, and the primate expresses the hair cell target protein.

[0046] In some embodiments of any of the compositions described herein, the composition further includes a pharmaceutically acceptable excipient.

[0047] Also provided herein are kits including any of the compositions described herein. In some embodiments of any of the kits described herein, the kit further includes a pre-loaded syringe containing the composition.

[0048] Also provided herein are methods of correcting a hair cell target gene defect in a hair cell of an inner ear in a primate that include: administering to the inner ear of the primate a therapeutically effective amount of any of the compositions described herein, where the administering repairs the hair cell target gene defect in the hair cell of the inner ear of the primate.

[0049] Also provided herein are methods of increasing the expression level of a hair cell target protein in a hair cell of an inner ear of a primate that include: administering to the inner ear of the primate a therapeutically effective amount of any of the compositions described herein, where the administering results in an increase in the expression level of the hair cell target protein in the hair cell of the inner ear of the primate.

[0050] In some embodiments of any of the methods described herein, the primate has previously been determined to have a defective hair cell target gene.

[0051] Also provided herein are methods of treating non-syndromic sensorineural hearing loss in a primate identified as having a defective hair cell target gene that include: administering to the inner ear of the primate a therapeutically effective amount of any of the compositions described herein.

[0052] In some embodiments of any of the methods described herein, the method further includes, prior to the administering step, determining that the primate has a defective hair cell target gene.

[0053] Also provided herein are methods of restoring hearing in a primate identified or diagnosed as having hearing loss that include: administering to the inner ear of the primate a therapeutically effective amount of any composition described herein.

[0054] In some embodiments of any of the methods described herein, the method further includes prior to the administering step, determining that the primate has a defective hair cell target gene.

[0055] Also provided herein are methods of restoring synapses and/or preserving spiral ganglion nerves in a primate identified or diagnosed as having an inner ear disorder that include: administering to the inner ear of the primate a therapeutically effective amount of any composition described herein.

[0056] In some embodiments of any of the methods described herein, the method further includes prior to the administering step, determining that the primate has a defective hair cell target gene.

[0057] Also provided herein are methods including administering to an inner ear of a primate a therapeutically effective amount of any composition described herein.

[0058] In some embodiments of any of the methods described herein, the primate has been previously identified as having a defective hair cell target gene.

[0059] The term “a” and “an” refers to one or to more than one (i.e., at least one) of the grammatical object of the article. By way of example, “an element” encompasses one element and more than one element.

[0060] The term “supporting cell target protein” means a protein that is expressed in a supporting cell in a primate and functionally contributes, at least in part, to the hearing in the primate. Non-limiting examples of supporting cell target proteins include GJB2 and SLC26A4.

[0061] The term “mutation in a supporting cell target gene” refers to a modification in a wildtype supporting cell target gene that results in the production of a supporting cell target protein having one or more of: a deletion in one or more amino acids, one or more amino acid substitutions, and one or more amino acid insertions as compared to the wildtype supporting cell target protein, and/or results in a decrease in the expressed level of the encoded supporting cell target protein in a primate cell as compared to the expressed level of the encoded supporting cell target protein in a primate cell not having a mutation. In some embodiments, a mutation can result in the production of a supporting cell target protein having a deletion in one or more amino acids (e.g., 2, 3, 4, 5, 6, 7, 8, 9, 10, 11, 12, 13, 14, 15 16, 17, 18, 19, or 20 amino acids). In some embodiments, the mutation can result in a frameshift in the supporting cell target gene. The term “hair cell target protein” means a protein that is expressed in a hair cell in a primate and functionally contributes, at least in part, to the hearing in the primate. Non-limiting examples of hair cell target proteins include tectorin alpha (TECTA), unconventional myson-15 (MYO15A), myosin MA (MYO3A), myosin VI (MYO6), myosin VIIA (MYO7A), cadherin related 23 (CDH23), collagen type XI alpha 2 chain (COL11A2), lipoxygenase homology domains 1 (LOXHD1), protocadherin related 15 (PCDH15), whirlin (WHRN), an otoferlin (OTOF) gene, a trio rho guanine nucleotide exchange factor (TRIO) and f-actin binding protein (TRIOBP) gene, a stereocilin (STRC) gene, a pejvakin (PJVK) gene, a norrin cysteine knot growth factor (NDP) gene, a clarin 1 (CLRN1) gene, a transmembrane channel-like 1 (TMC1) gene, a vascular endothelial growth factor (VEGF) gene, and a heat shock protein family A (Hsp70) member 1A (HSPA1A) gene.

[0062] The term “mutation in a hair cell target gene” refers to a modification in a wildtype hair cell target gene that results in the production of a hair cell target protein having one or more of: a deletion in one or more amino acids, one or more amino acid substitutions, and one or more amino acid insertions as compared to the wildtype hair cell target protein, and/or results in a decrease in the expressed level of the encoded hair cell target protein in a primate cell as compared to the expressed level of the encoded hair cell target protein in a primate cell not having a mutation. In some embodiments, a mutation can result in the production of a hair cell target protein having a deletion in one or more amino acids (e.g., 2, 3, 4, 5, 6, 7, 8, 9, 10, 11, 12, 13, 14, 15 16, 17, 18, 19, or 20 amino acids). In some embodiments, the mutation can result in a frameshift in the hair cell target gene.

[0063] The term “frameshift” is known in the art to encompass any mutation in a coding sequence that results in a shift in the reading frame of the coding sequence. In some embodiments, a frameshift can result in a nonfunctional protein. In some embodiments, a point mutation can be a nonsense mutation (i.e., result in a premature stop codon in an exon of the gene). A nonsense mutation can result in the production of a truncated protein (as compared to a corresponding wildtype protein) that may or may not be functional. In some embodiments, the mutation can result in the loss (or a decrease in the level) of expression of hair cell target mRNA or hair cell target protein or both the mRNA and protein. In some embodiments, the mutation can result in the production of an altered hair cell target protein having a loss or decrease in one or more biological activities (functions) as compared to a wildtype hair cell target protein. In some embodiments, the mutation can result in the loss (or a decrease in the level) of expression of supporting cell target mRNA or supporting cell target protein or both the mRNA and protein. In some embodiments, the mutation can result in the production of an altered supporting cell target protein having a loss or decrease in one or more biological activities (functions) as compared to a wildtype supporting cell target protein.

[0064] In some embodiments, the mutation is an insertion of one or more nucleotides into a hair cell target gene. In some embodiments, the mutation is in a regulatory sequence of the hair cell target gene, i.e., a portion of the gene that is not coding sequence. In some embodiments, a mutation in a regulatory sequence may be in a promoter or enhancer region and prevent or reduce the proper transcription of the hair cell target gene. In some embodiments, the mutation is an insertion of one or more nucleotides into a supporting cell target gene. In some embodiments, the mutation is in a regulatory sequence of the supporting cell target gene, i.e., a portion of the gene that is not coding sequence. In some embodiments, a mutation in a regulatory sequence may be in a promoter or enhancer region and prevent or reduce the proper transcription of the supporting cell target gene. The term “conservative mutation” refers to a mutation that does not change the amino acid encoded at the site of the mutation (due to codon degeneracy).

[0065] Modifications can be introduced into a nucleotide sequence by standard techniques known in the art, such as site-directed mutagenesis and PCR-mediated mutagenesis. Conservative amino acid substitutions are ones in which the amino acid residue is replaced with an amino acid residue having a similar side chain. Families of amino acid residues having similar side chains have been defined in the art. These families include amino acids with basic side chains (e.g., lysine, arginine, and histidine), acidic side chains (e.g., aspartic acid and glutamic acid), uncharged polar side chains (e.g., glycine, asparagine, glutamine, serine, threonine, tyrosine, cysteine, and tryptophan), nonpolar side chains (e.g., alanine, valine, leucine, isoleucine, proline, phenylalanine, and methionine), beta-branched side chains (e.g., threonine, valine, and isoleucine), and aromatic side chains (e.g., tyrosine, phenylalanine, tryptophan, and histidine).

[0066] Unless otherwise specified, a “nucleotide sequence encoding an amino acid sequence” includes all nucleotide sequences that are degenerate versions of each other and thus encode the same amino acid sequence.

[0067] The term “endogenous” refers to any material originating from within an organism, cell, or tissue.

[0068] The term “exogenous” refers to any material introduced from or originating from outside an organism, cell, or tissue that is not produced or does not originate from the same organism, cell, or tissue in which it is being introduced.

[0069] The term “isolated” means altered or removed from the natural state. For example, a nucleic acid or a peptide naturally present in a living animal is not “isolated,” but the same nucleic acid or peptide partially or completely separated from the coexisting materials of its natural state is “isolated.” An isolated nucleic acid or protein can exist in substantially purified form, or can exist in a non-native environment such as, for example, a host cell.

[0070] The term “transfected,” “transformed,” or “transduced” refers to a process by which exogenous nucleic acid is transferred or introduced into a cell. A “transfected,” “transformed,” or “transduced” primate cell is one that has been transfected, transformed or transduced with exogenous nucleic acid.

[0071] The term “expression” refers to the transcription and/or translation of a particular nucleotide sequence encoding a protein.

[0072] The term “transient expression” refers to the expression of a non-integrated coding sequence for a short period of time (e.g., hours or days). The coding sequence that is transiently expressed in a cell (e.g., a primate cell) is lost upon multiple rounds of cell division.

[0073] The term “primate” is intended to include any primate (e.g., a human, a non-human primate (e.g., simian (e.g., a monkey (e.g., a marmoset, a baboon, or a macaque), or an ape (e.g., a gorilla, a gibbon, an orangutan, or a chimpanzee). In some embodiments, the primate has or is at risk of having hearing loss. In some embodiments, the primate has been previously identified as having a mutation in a hair cell target gene (e.g., an OTOF gene, a TRIOBP gene, a STRC gene, a PJVK gene, a NDP gene, a CLRN1 gene, a TMC1 gene, a VEGF gene, or a HSPA1A gene). In some embodiments, the primate has been previously identified as having a mutation in a supporting cell target gene (e.g., a GJB2 gene or a SLC26A4 gene). In some embodiments, the primate has been previously identified as having a mutation in a GJB2 gene. In some embodiments, the primate has been previously identified as having a mutation in a SLC26A4 gene. In some embodiments, the primate has been identified as having a mutation in a hair cell target gene (e.g., an OTOF gene, a TRIOBP gene, a STRC gene, a PJVK gene, a NDP gene, a CLRN1 gene, a TMC1 gene, a VEGF gene, or a HSPA1A gene) and has been diagnosed with hearing loss. In some embodiments, the primate has been identified as having a mutation in a supporting cell target gene (e.g., a GBJ2 gene or a SLC26A4 gene) and has been diagnosed with hearing loss. In some embodiments, the primate has been identified as having hearing loss.

[0074] A treatment is “therapeutically effective” when it results in a reduction in one or more of the number, severity, and frequency of one or more symptoms of a disease state (hearing loss, e.g., non-syndromic sensorineural hearing loss or syndromic sensorineural hearing loss) in a primate. In some embodiments, a therapeutically effective amount of a composition can result in an increase in the expression level of an active target protein (e.g., a supporting cell target protein (e.g., a wildtype, full-length supporting cell target protein or a variant of a supporting cell target protein that has the desired activity) (e.g., as compared to the expression level prior to treatment with the composition) or a hair cell target protein (e.g., a wildtype, full-length hair cell target protein or a variant of a hair cell target protein that has the desired activity) (e.g., as compared to the expression level prior to treatment with the composition)). In some embodiments, a therapeutically effective amount of a composition can result in an increase in the expression level of an active target protein (e.g., an active supporting cell target protein (e.g., a wildtype, full-length supporting cell target protein or active variant) ort an active hair cell target protein (e.g., a wildtype, full-length hair cell target protein or active variant) in a target cell (e.g., a supporting cell or a hair cell). In some embodiments, a therapeutically effective amount of a composition can result in an increase in the expression level of an active target protein (e.g., an active supporting cell target protein (e.g., a wildtype, full-length supporting cell target protein or active variant) or an active hair cell target protein (e.g., a wildtype, full-length hair cell target protein or active variant), and/or an increase in one or more activities of a target protein (e.g., a supporting cell target protein or a hair cell target protein) in a target cell (e.g., as compared to a reference level, such as the level(s) in a primate prior to treatment, the level(s) in a primate having a mutation in a target gene (e.g., a supporting cell target gene or a hair cell target gene), or the level(s) in a primate or a population of primates having hearing loss, e.g., non-syndromic sensorineural hearing loss or syndromic sensorineural hearing loss).

[0075] The term “nucleic acid” or “polynucleotide” refers to deoxyribonucleic acid (DNA) or ribonucleic acid (RNA), or a combination thereof, in either single- or double-stranded form. Unless specifically limited, the term encompasses nucleic acids containing known analogues of natural nucleotides that have similar binding properties as the reference nucleotides. Unless otherwise indicated, a particular nucleic acid sequence also implicitly encompasses complementary sequences as well as the sequence explicitly indicated. In some embodiments of any of the nucleic acids described herein, the nucleic acid is DNA. In some embodiments of any of the nucleic acids described herein, the nucleic acid is RNA.

[0076] The term “active hair cell target protein” means a protein encoded by DNA that, if substituted for both wildtype alleles encoding full-length hair cell target protein in hair cells of what is otherwise a wildtype primate, and if expressed in the hair cells of that primate, results in that primate's having a level of hearing approximating the normal level of hearing of a similar primate that is entirely wildtype. Non-limiting examples of active hair cell target proteins are full-length hair cell target proteins (e.g., any of the full-length hair cell target proteins described herein).

[0077] The term “active supporting cell target protein” means a protein encoded by DNA that, if substituted for both wildtype alleles encoding full-length supporting cell target protein in supporting cells of what is otherwise a wildtype primate, and if expressed in the supporting cells of that primate, results in that primate's having a level of hearing approximating the normal level of hearing of a similar primate that is entirely wildtype. Non-limiting examples of active supporting cell target proteins are full-length supporting cell target proteins (e.g., any of the full-length supporting cell target proteins described herein).

[0078] For example, an active target protein (e.g., an active supporting cell target protein or an active hair cell target protein) can include a sequence of a wildtype, full-length target protein (e.g., a supporting cell target protein (e.g., a wildtype, human, full-length supporting cell target protein) or a hair cell target protein (e.g., a wildtype, human, full-length hair cell target protein) including 1 amino acid substitution to about 160 amino acid substitutions, 1 amino acid substitution to about 155 amino acid substitutions, 1 amino acid substitution to about 150 amino acid substitutions, 1 amino acid substitution to about 145 amino acid substitutions, 1 amino acid substitution to about 140 amino acid substitutions, 1 amino acid substitution to about 135 amino acid substitutions, 1 amino acid substitution to about 130 amino acid substitutions, 1 amino acid substitution to about 125 amino acid substitutions, 1 amino acid substitution to about 120 amino acid substitutions, 1 amino acid substitution to about 115 amino acid substitutions, 1 amino acid substitution to about 110 amino acid substitutions, 1 amino acid substitution to about 105 amino acid substitutions, 1 amino acid substitution to about 100 amino acid substitutions, 1 amino acid substitution to about 95 amino acid substitutions, 1 amino acid substitution to about 90 amino acid substitutions, 1 amino acid substitution to about 85 amino acid substitutions, 1 amino acid substitution to about 80 amino acid substitutions, 1 amino acid substitution to about 75 amino acid substitutions, 1 amino acid substitution to about 70 amino acid substitutions, 1 amino acid substitution to about 65 amino acid substitutions, 1 amino acid substitution to about 60 amino acid substitutions, 1 amino acid substitution to about 55 amino acid substitutions, 1 amino acid substitution to about 50 amino acid substitutions, 1 amino acid substitution to about 45 amino acid substitutions, 1 amino acid substitution to about 40 amino acid substitutions, 1 amino acid substitution to about 35 amino acid substitutions, 1 amino acid substitution to about 30 amino acid substitutions, 1 amino acid substitution to about 25 amino acid substitutions, 1 amino acid substitution to about 20 amino acid substitutions, 1 amino acid substitution to about 15 amino acid substitutions, 1 amino acid substitution to about 10 amino acid substitutions, 1 amino acid substitution to about 9 amino acid substitutions, 1 amino acid substitution to about 8 amino acid substitutions, 1 amino acid substitution to about 7 amino acid substitutions, 1 amino acid substitution to about 6 amino acid substitutions, 1 amino acid substitution to about 5 amino acid substitutions, 1 amino acid substitution to about 4 amino acid substitutions, 1 amino acid substitution to about 3 amino acid substitutions, between about 2 amino acid substitutions to about 160 amino acid substitutions, about 2 amino acid substitutions to about 155 amino acid substitutions, about 2 amino acid substitutions to about 150 amino acid substitutions, about 2 amino acid substitutions to about 145 amino acid substitutions, about 2 amino acid substitutions to about 140 amino acid substitutions, about 2 amino acid substitutions to about 135 amino acid substitutions, about 2 amino acid substitutions to about 130 amino acid substitutions, about 2 amino acid substitutions to about 125 amino acid substitutions, about 2 amino acid substitutions to about 120 amino acid substitutions, about 2 amino acid substitutions to about 115 amino acid substitutions, about 2 amino acid substitutions to about 110 amino acid substitutions, about 2 amino acid substitutions to about 105 amino acid substitutions, about 2 amino acid substitutions to about 100 amino acid substitutions, about 2 amino acid substitutions to about 95 amino acid substitutions, about 2 amino acid substitutions to about 90 amino acid substitutions, about 2 amino acid substitutions to about 85 amino acid substitutions, about 2 amino acid substitutions to about 80 amino acid substitutions, about 2 amino acid substitutions to about 75 amino acid substitutions, about 2 amino acid substitutions to about 70 amino acid substitutions, about 2 amino acid substitutions to about 65 amino acid substitutions, about 2 amino acid substitutions to about 60 amino acid substitutions, about 2 amino acid substitutions to about 55 amino acid substitutions, about 2 amino acid substitutions to about 50 amino acid substitutions, about 2 amino acid substitutions to about 45 amino acid substitutions, about 2 amino acid substitutions to about 40 amino acid substitutions, about 2 amino acid substitutions to about 35 amino acid substitutions, about 2 amino acid substitutions to about 30 amino acid substitutions, about 2 amino acid substitutions to about 25 amino acid substitutions, about 2 amino acid substitutions to about 20 amino acid substitutions, about 2 amino acid substitutions to about 15 amino acid substitutions, about 2 amino acid substitutions to about 10 amino acid substitutions, about 2 amino acid substitutions to about 9 amino acid substitutions, about 2 amino acid substitutions to about 8 amino acid substitutions, about 2 amino acid substitutions to about 7 amino acid substitutions, about 2 amino acid substitutions to about 6 amino acid substitutions, about 2 amino acid substitutions to about 5 amino acid substitutions, about 2 amino acid substitutions to about 4 amino acid substitutions, between about 3 amino acid substitutions to about 160 amino acid substitutions, about 3 amino acid substitutions to about 155 amino acid substitutions, about 3 amino acid substitutions to about 150 amino acid substitutions, about 3 amino acid substitutions to about 145 amino acid substitutions, about 3 amino acid substitutions to about 140 amino acid substitutions, about 3 amino acid substitutions to about 135 amino acid substitutions, about 3 amino acid substitutions to about 130 amino acid substitutions, about 3 amino acid substitutions to about 125 amino acid substitutions, about 3 amino acid substitutions to about 120 amino acid substitutions, about 3 amino acid substitutions to about 115 amino acid substitutions, about 3 amino acid substitutions to about 110 amino acid substitutions, about 3 amino acid substitutions to about 105 amino acid substitutions, about 3 amino acid substitutions to about 100 amino acid substitutions, about 3 amino acid substitutions to about 95 amino acid substitutions, about 3 amino acid substitutions to about 90 amino acid substitutions, about 3 amino acid substitutions to about 85 amino acid substitutions, about 3 amino acid substitutions to about 80 amino acid substitutions, about 3 amino acid substitutions to about 75 amino acid substitutions, about 3 amino acid substitutions to about 70 amino acid substitutions, about 3 amino acid substitutions to about 65 amino acid substitutions, about 3 amino acid substitutions to about 60 amino acid substitutions, about 3 amino acid substitutions to about 55 amino acid substitutions, about 3 amino acid substitutions to about 50 amino acid substitutions, about 3 amino acid substitutions to about 45 amino acid substitutions, about 3 amino acid substitutions to about 40 amino acid substitutions, about 3 amino acid substitutions to about 35 amino acid substitutions, about 3 amino acid substitutions to about 30 amino acid substitutions, about 3 amino acid substitutions to about 25 amino acid substitutions, about 3 amino acid substitutions to about 20 amino acid substitutions, about 3 amino acid substitutions to about 15 amino acid substitutions, about 3 amino acid substitutions to about 10 amino acid substitutions, about 3 amino acid substitutions to about 9 amino acid substitutions, about 3 amino acid substitutions to about 8 amino acid substitutions, about 3 amino acid substitutions to about 7 amino acid substitutions, about 3 amino acid substitutions to about 6 amino acid substitutions, about 3 amino acid substitutions to about 5 amino acid substitutions, between about 4 amino acid substitutions to about 160 amino acid substitutions, about 4 amino acid substitutions to about 155 amino acid substitutions, about 4 amino acid substitutions to about 150 amino acid substitutions, about 4 amino acid substitutions to about 145 amino acid substitutions, about 4 amino acid substitutions to about 140 amino acid substitutions, about 4 amino acid substitutions to about 135 amino acid substitutions, about 4 amino acid substitutions to about 130 amino acid substitutions, about 4 amino acid substitutions to about 125 amino acid substitutions, about 4 amino acid substitutions to about 120 amino acid substitutions, about 4 amino acid substitutions to about 115 amino acid substitutions, about 4 amino acid substitutions to about 110 amino acid substitutions, about 4 amino acid substitutions to about 105 amino acid substitutions, about 4 amino acid substitutions to about 100 amino acid substitutions, about 4 amino acid substitutions to about 95 amino acid substitutions, about 4 amino acid substitutions to about 90 amino acid substitutions, about 4 amino acid substitutions to about 85 amino acid substitutions, about 4 amino acid substitutions to about 80 amino acid substitutions, about 4 amino acid substitutions to about 75 amino acid substitutions, about 4 amino acid substitutions to about 70 amino acid substitutions, about 4 amino acid substitutions to about 65 amino acid substitutions, about 4 amino acid substitutions to about 60 amino acid substitutions, about 4 amino acid substitutions to about 55 amino acid substitutions, about 4 amino acid substitutions to about 50 amino acid substitutions, about 4 amino acid substitutions to about 45 amino acid substitutions, about 4 amino acid substitutions to about 40 amino acid substitutions, about 4 amino acid substitutions to about 35 amino acid substitutions, about 4 amino acid substitutions to about 30 amino acid substitutions, about 4 amino acid substitutions to about 25 amino acid substitutions, about 4 amino acid substitutions to about 20 amino acid substitutions, about 4 amino acid substitutions to about 15 amino acid substitutions, about 4 amino acid substitutions to about 10 amino acid substitutions, about 4 amino acid substitutions to about 9 amino acid substitutions, about 4 amino acid substitutions to about 8 amino acid substitutions, about 4 amino acid substitutions to about 7 amino acid substitutions, about 4 amino acid substitutions to about 6 amino acid substitutions, between about 5 amino acid substitutions to about 160 amino acid substitutions, about 5 amino acid substitutions to about 155 amino acid substitutions, about 5 amino acid substitutions to about 150 amino acid substitutions, about 5 amino acid substitutions to about 145 amino acid substitutions, about 5 amino acid substitutions to about 140 amino acid substitutions, about 5 amino acid substitutions to about 135 amino acid substitutions, about 5 amino acid substitutions to about 130 amino acid substitutions, about 5 amino acid substitutions to about 125 amino acid substitutions, about 5 amino acid substitutions to about 120 amino acid substitutions, about 5 amino acid substitutions to about 115 amino acid substitutions, about 5 amino acid substitutions to about 110 amino acid substitutions, about 5 amino acid substitutions to about 105 amino acid substitutions, about 5 amino acid substitutions to about 100 amino acid substitutions, about 5 amino acid substitutions to about 95 amino acid substitutions, about 5 amino acid substitutions to about 90 amino acid substitutions, about 5 amino acid substitutions to about 85 amino acid substitutions, about 5 amino acid substitutions to about 80 amino acid substitutions, about 5 amino acid substitutions to about 75 amino acid substitutions, about 5 amino acid substitutions to about 70 amino acid substitutions, about 5 amino acid substitutions to about 65 amino acid substitutions, about 5 amino acid substitutions to about 60 amino acid substitutions, about 5 amino acid substitutions to about 55 amino acid substitutions, about 5 amino acid substitutions to about 50 amino acid substitutions, about 5 amino acid substitutions to about 45 amino acid substitutions, about 5 amino acid substitutions to about 40 amino acid substitutions, about 5 amino acid substitutions to about 35 amino acid substitutions, about 5 amino acid substitutions to about 30 amino acid substitutions, about 5 amino acid substitutions to about 25 amino acid substitutions, about 5 amino acid substitutions to about 20 amino acid substitutions, about 5 amino acid substitutions to about 15 amino acid substitutions, about 5 amino acid substitutions to about 10 amino acid substitutions, about 5 amino acid substitutions to about 9 amino acid substitutions, about 5 amino acid substitutions to about 8 amino acid substitutions, about 5 amino acid substitutions to about 7 amino acid substitutions, between about 6 amino acid substitutions to about 160 amino acid substitutions, about 6 amino acid substitutions to about 155 amino acid substitutions, about 6 amino acid substitutions to about 150 amino acid substitutions, about 6 amino acid substitutions to about 145 amino acid substitutions, about 6 amino acid substitutions to about 140 amino acid substitutions, about 6 amino acid substitutions to about 135 amino acid substitutions, about 6 amino acid substitutions to about 130 amino acid substitutions, about 6 amino acid substitutions to about 125 amino acid substitutions, about 6 amino acid substitutions to about 120 amino acid substitutions, about 6 amino acid substitutions to about 115 amino acid substitutions, about 6 amino acid substitutions to about 110 amino acid substitutions, about 6 amino acid substitutions to about 105 amino acid substitutions, about 6 amino acid substitutions to about 100 amino acid substitutions, about 6 amino acid substitutions to about 95 amino acid substitutions, about 6 amino acid substitutions to about 90 amino acid substitutions, about 6 amino acid substitutions to about 85 amino acid substitutions, about 6 amino acid substitutions to about 80 amino acid substitutions, about 6 amino acid substitutions to about 75 amino acid substitutions, about 6 amino acid substitutions to about 70 amino acid substitutions, about 6 amino acid substitutions to about 65 amino acid substitutions, about 6 amino acid substitutions to about 60 amino acid substitutions, about 6 amino acid substitutions to about 55 amino acid substitutions, about 6 amino acid substitutions to about 50 amino acid substitutions, about 6 amino acid substitutions to about 45 amino acid substitutions, about 6 amino acid substitutions to about 40 amino acid substitutions, about 6 amino acid substitutions to about 35 amino acid substitutions, about 6 amino acid substitutions to about 30 amino acid substitutions, about 6 amino acid substitutions to about 25 amino acid substitutions, about 6 amino acid substitutions to about 20 amino acid substitutions, about 6 amino acid substitutions to about 15 amino acid substitutions, about 6 amino acid substitutions to about 10 amino acid substitutions, about 6 amino acid substitutions to about 9 amino acid substitutions, about 6 amino acid substitutions to about 8 amino acid substitutions, between about 7 amino acid substitutions to about 160 amino acid substitutions, about 7 amino acid substitutions to about 155 amino acid substitutions, about 7 amino acid substitutions to about 150 amino acid substitutions, about 7 amino acid substitutions to about 145 amino acid substitutions, about 7 amino acid substitutions to about 140 amino acid substitutions, about 7 amino acid substitutions to about 135 amino acid substitutions, about 7 amino acid substitutions to about 130 amino acid substitutions, about 7 amino acid substitutions to about 125 amino acid substitutions, about 7 amino acid substitutions to about 120 amino acid substitutions, about 7 amino acid substitutions to about 115 amino acid substitutions, about 7 amino acid substitutions to about 110 amino acid substitutions, about 7 amino acid substitutions to about 105 amino acid substitutions, about 7 amino acid substitutions to about 100 amino acid substitutions, about 7 amino acid substitutions to about 95 amino acid substitutions, about 7 amino acid substitutions to about 90 amino acid substitutions, about 7 amino acid substitutions to about 85 amino acid substitutions, about 7 amino acid substitutions to about 80 amino acid substitutions, about 7 amino acid substitutions to about 75 amino acid substitutions, about 7 amino acid substitutions to about 70 amino acid substitutions, about 7 amino acid substitutions to about 65 amino acid substitutions, about 7 amino acid substitutions to about 60 amino acid substitutions, about 7 amino acid substitutions to about 55 amino acid substitutions, about 7 amino acid substitutions to about 50 amino acid substitutions, about 7 amino acid substitutions to about 45 amino acid substitutions, about 7 amino acid substitutions to about 40 amino acid substitutions, about 7 amino acid substitutions to about 35 amino acid substitutions, about 7 amino acid substitutions to about 30 amino acid substitutions, about 7 amino acid substitutions to about 25 amino acid substitutions, about 7 amino acid substitutions to about 20 amino acid substitutions, about 7 amino acid substitutions to about 15 amino acid substitutions, about 7 amino acid substitutions to about 10 amino acid substitutions, about 7 amino acid substitutions to about 9 amino acid substitutions, between about 8 amino acid substitutions to about 160 amino acid substitutions, about 8 amino acid substitutions to about 155 amino acid substitutions, about 8 amino acid substitutions to about 150 amino acid substitutions, about 8 amino acid substitutions to about 145 amino acid substitutions, about 8 amino acid substitutions to about 140 amino acid substitutions, about 8 amino acid substitutions to about 135 amino acid substitutions, about 8 amino acid substitutions to about 130 amino acid substitutions, about 8 amino acid substitutions to about 125 amino acid substitutions, about 8 amino acid substitutions to about 120 amino acid substitutions, about 8 amino acid substitutions to about 115 amino acid substitutions, about 8 amino acid substitutions to about 110 amino acid substitutions, about 8 amino acid substitutions to about 105 amino acid substitutions, about 8 amino acid substitutions to about 100 amino acid substitutions, about 8 amino acid substitutions to about 95 amino acid substitutions, about 8 amino acid substitutions to about 90 amino acid substitutions, about 8 amino acid substitutions to about 85 amino acid substitutions, about 8 amino acid substitutions to about 80 amino acid substitutions, about 8 amino acid substitutions to about 75 amino acid substitutions, about 8 amino acid substitutions to about 70 amino acid substitutions, about 8 amino acid substitutions to about 65 amino acid substitutions, about 8 amino acid substitutions to about 60 amino acid substitutions, about 8 amino acid substitutions to about 55 amino acid substitutions, about 8 amino acid substitutions to about 50 amino acid substitutions, about 8 amino acid substitutions to about 45 amino acid substitutions, about 8 amino acid substitutions to about 40 amino acid substitutions, about 8 amino acid substitutions to about 35 amino acid substitutions, about 8 amino acid substitutions to about 30 amino acid substitutions, about 8 amino acid substitutions to about 25 amino acid substitutions, about 8 amino acid substitutions to about 20 amino acid substitutions, about 8 amino acid substitutions to about 15 amino acid substitutions, about 8 amino acid substitutions to about 10 amino acid substitutions, between about 10 amino acid substitutions to about 160 amino acid substitutions, about 10 amino acid substitutions to about 155 amino acid substitutions, about 10 amino acid substitutions to about 150 amino acid substitutions, about 10 amino acid substitutions to about 145 amino acid substitutions, about 10 amino acid substitutions to about 140 amino acid substitutions, about 10 amino acid substitutions to about 135 amino acid substitutions, about 10 amino acid substitutions to about 130 amino acid substitutions, about 10 amino acid substitutions to about 125 amino acid substitutions, about 10 amino acid substitutions to about 120 amino acid substitutions, about 10 amino acid substitutions to about 115 amino acid substitutions, about 10 amino acid substitutions to about 110 amino acid substitutions, about 10 amino acid substitutions to about 105 amino acid substitutions, about 10 amino acid substitutions to about 100 amino acid substitutions, about 10 amino acid substitutions to about 95 amino acid substitutions, about 10 amino acid substitutions to about 90 amino acid substitutions, about 10 amino acid substitutions to about 85 amino acid substitutions, about 10 amino acid substitutions to about 80 amino acid substitutions, about 10 amino acid substitutions to about 75 amino acid substitutions, about 10 amino acid substitutions to about 70 amino acid substitutions, about 10 amino acid substitutions to about 65 amino acid substitutions, about 10 amino acid substitutions to about 60 amino acid substitutions, about 10 amino acid substitutions to about 55 amino acid substitutions, about 10 amino acid substitutions to about 50 amino acid substitutions, about 10 amino acid substitutions to about 45 amino acid substitutions, about 10 amino acid substitutions to about 40 amino acid substitutions, about 10 amino acid substitutions to about 35 amino acid substitutions, about 10 amino acid substitutions to about 30 amino acid substitutions, about 10 amino acid substitutions to about 25 amino acid substitutions, about 10 amino acid substitutions to about 20 amino acid substitutions, about 10 amino acid substitutions to about 15 amino acid substitutions, between about 15 amino acid substitutions to about 160 amino acid substitutions, about 15 amino acid substitutions to about 155 amino acid substitutions, about 15 amino acid substitutions to about 150 amino acid substitutions, about 15 amino acid substitutions to about 145 amino acid substitutions, about 15 amino acid substitutions to about 140 amino acid substitutions, about 15 amino acid substitutions to about 135 amino acid substitutions, about 15 amino acid substitutions to about 130 amino acid substitutions, about 15 amino acid substitutions to about 125 amino acid substitutions, about 15 amino acid substitutions to about 120 amino acid substitutions, about 15 amino acid substitutions to about 115 amino acid substitutions, about 15 amino acid substitutions to about 110 amino acid substitutions, about 15 amino acid substitutions to about 105 amino acid substitutions, about 15 amino acid substitutions to about 100 amino acid substitutions, about 15 amino acid substitutions to about 95 amino acid substitutions, about 15 amino acid substitutions to about 90 amino acid substitutions, about 15 amino acid substitutions to about 85 amino acid substitutions, about 15 amino acid substitutions to about 80 amino acid substitutions, about 15 amino acid substitutions to about 75 amino acid substitutions, about 15 amino acid substitutions to about 70 amino acid substitutions, about 15 amino acid substitutions to about 65 amino acid substitutions, about 15 amino acid substitutions to about 60 amino acid substitutions, about 15 amino acid substitutions to about 55 amino acid substitutions, about 15 amino acid substitutions to about 50 amino acid substitutions, about 15 amino acid substitutions to about 45 amino acid substitutions, about 15 amino acid substitutions to about 40 amino acid substitutions, about 15 amino acid substitutions to about 35 amino acid substitutions, about 15 amino acid substitutions to about 30 amino acid substitutions, about 15 amino acid substitutions to about 25 amino acid substitutions, about 15 amino acid substitutions to about 20 amino acid substitutions, between about 20 amino acid substitutions to about 160 amino acid substitutions, about 20 amino acid substitutions to about 155 amino acid substitutions, about 20 amino acid substitutions to about 150 amino acid substitutions, about 20 amino acid substitutions to about 145 amino acid substitutions, about 20 amino acid substitutions to about 140 amino acid substitutions, about 20 amino acid substitutions to about 135 amino acid substitutions, about 20 amino acid substitutions to about 130 amino acid substitutions, about 20 amino acid substitutions to about 125 amino acid substitutions, about 20 amino acid substitutions to about 120 amino acid substitutions, about 20 amino acid substitutions to about 115 amino acid substitutions, about 20 amino acid substitutions to about 110 amino acid substitutions, about 20 amino acid substitutions to about 105 amino acid substitutions, about 20 amino acid substitutions to about 100 amino acid substitutions, about 20 amino acid substitutions to about 95 amino acid substitutions, about 20 amino acid substitutions to about 90 amino acid substitutions, about 20 amino acid substitutions to about 85 amino acid substitutions, about 20 amino acid substitutions to about 80 amino acid substitutions, about 20 amino acid substitutions to about 75 amino acid substitutions, about 20 amino acid substitutions to about 70 amino acid substitutions, about 20 amino acid substitutions to about 65 amino acid substitutions, about 20 amino acid substitutions to about 60 amino acid substitutions, about 20 amino acid substitutions to about 55 amino acid substitutions, about 20 amino acid substitutions to about 50 amino acid substitutions, about 20 amino acid substitutions to about 45 amino acid substitutions, about 20 amino acid substitutions to about 40 amino acid substitutions, about 20 amino acid substitutions to about 35 amino acid substitutions, about 20 amino acid substitutions to about 30 amino acid substitutions, about 20 amino acid substitutions to about 25 amino acid substitutions, between about 25 amino acid substitutions to about 160 amino acid substitutions, about 25 amino acid substitutions to about 155 amino acid substitutions, about 25 amino acid substitutions to about 150 amino acid substitutions, about 25 amino acid substitutions to about 145 amino acid substitutions, about 25 amino acid substitutions to about 140 amino acid substitutions, about 25 amino acid substitutions to about 135 amino acid substitutions, about 25 amino acid substitutions to about 130 amino acid substitutions, about 25 amino acid substitutions to about 125 amino acid substitutions, about 25 amino acid substitutions to about 120 amino acid substitutions, about 25 amino acid substitutions to about 115 amino acid substitutions, about 25 amino acid substitutions to about 110 amino acid substitutions, about 25 amino acid substitutions to about 105 amino acid substitutions, about 25 amino acid substitutions to about 100 amino acid substitutions, about 25 amino acid substitutions to about 95 amino acid substitutions, about 25 amino acid substitutions to about 90 amino acid substitutions, about 25 amino acid substitutions to about 85 amino acid substitutions, about 25 amino acid substitutions to about 80 amino acid substitutions, about 25 amino acid substitutions to about 75 amino acid substitutions, about 25 amino acid substitutions to about 70 amino acid substitutions, about 25 amino acid substitutions to about 65 amino acid substitutions, about 25 amino acid substitutions to about 60 amino acid substitutions, about 25 amino acid substitutions to about 55 amino acid substitutions, about 25 amino acid substitutions to about 50 amino acid substitutions, about 25 amino acid substitutions to about 45 amino acid substitutions, about 25 amino acid substitutions to about 40 amino acid substitutions, about 25 amino acid substitutions to about 35 amino acid substitutions, about 25 amino acid substitutions to about 30 amino acid substitutions, between about 30 amino acid substitutions to about 160 amino acid substitutions, about 30 amino acid substitutions to about 155 amino acid substitutions, about 30 amino acid substitutions to about 150 amino acid substitutions, about 30 amino acid substitutions to about 145 amino acid substitutions, about 30 amino acid substitutions to about 140 amino acid substitutions, about 30 amino acid substitutions to about 135 amino acid substitutions, about 30 amino acid substitutions to about 130 amino acid substitutions, about 30 amino acid substitutions to about 125 amino acid substitutions, about 30 amino acid substitutions to about 120 amino acid substitutions, about 30 amino acid substitutions to about 115 amino acid substitutions, about 30 amino acid substitutions to about 110 amino acid substitutions, about 30 amino acid substitutions to about 105 amino acid substitutions, about 30 amino acid substitutions to about 100 amino acid substitutions, about 30 amino acid substitutions to about 95 amino acid substitutions, about 30 amino acid substitutions to about 90 amino acid substitutions, about 30 amino acid substitutions to about 85 amino acid substitutions, about 30 amino acid substitutions to about 80 amino acid substitutions, about 30 amino acid substitutions to about 75 amino acid substitutions, about 30 amino acid substitutions to about 70 amino acid substitutions, about 30 amino acid substitutions to about 65 amino acid substitutions, about 30 amino acid substitutions to about 60 amino acid substitutions, about 30 amino acid substitutions to about 55 amino acid substitutions, about 30 amino acid substitutions to about 50 amino acid substitutions, about 30 amino acid substitutions to about 45 amino acid substitutions, about 30 amino acid substitutions to about 40 amino acid substitutions, about 30 amino acid substitutions to about 35 amino acid substitutions, between about 35 amino acid substitutions to about 160 amino acid substitutions, about 35 amino acid substitutions to about 155 amino acid substitutions, about 35 amino acid substitutions to about 150 amino acid substitutions, about 35 amino acid substitutions to about 145 amino acid substitutions, about 35 amino acid substitutions to about 140 amino acid substitutions, about 35 amino acid substitutions to about 135 amino acid substitutions, about 35 amino acid substitutions to about 130 amino acid substitutions, about 35 amino acid substitutions to about 125 amino acid substitutions, about 35 amino acid substitutions to about 120 amino acid substitutions, about 35 amino acid substitutions to about 115 amino acid substitutions, about 35 amino acid substitutions to about 110 amino acid substitutions, about 35 amino acid substitutions to about 105 amino acid substitutions, about 35 amino acid substitutions to about 100 amino acid substitutions, about 35 amino acid substitutions to about 95 amino acid substitutions, about 35 amino acid substitutions to about 90 amino acid substitutions, about 35 amino acid substitutions to about 85 amino acid substitutions, about 35 amino acid substitutions to about 80 amino acid substitutions, about 35 amino acid substitutions to about 75 amino acid substitutions, about 35 amino acid substitutions to about 70 amino acid substitutions, about 35 amino acid substitutions to about 65 amino acid substitutions, about 35 amino acid substitutions to about 60 amino acid substitutions, about 35 amino acid substitutions to about 55 amino acid substitutions, about 35 amino acid substitutions to about 50 amino acid substitutions, about 35 amino acid substitutions to about 45 amino acid substitutions, about 35 amino acid substitutions to about 40 amino acid substitutions, between about 40 amino acid substitutions to about 160 amino acid substitutions, about 40 amino acid substitutions to about 155 amino acid substitutions, about 40 amino acid substitutions to about 150 amino acid substitutions, about 40 amino acid substitutions to about 145 amino acid substitutions, about 40 amino acid substitutions to about 140 amino acid substitutions, about 40 amino acid substitutions to about 135 amino acid substitutions, about 40 amino acid substitutions to about 130 amino acid substitutions, about 40 amino acid substitutions to about 125 amino acid substitutions, about 40 amino acid substitutions to about 120 amino acid substitutions, about 40 amino acid substitutions to about 115 amino acid substitutions, about 40 amino acid substitutions to about 110 amino acid substitutions, about 40 amino acid substitutions to about 105 amino acid substitutions, about 40 amino acid substitutions to about 100 amino acid substitutions, about 40 amino acid substitutions to about 95 amino acid substitutions, about 40 amino acid substitutions to about 90 amino acid substitutions, about 40 amino acid substitutions to about 85 amino acid substitutions, about 40 amino acid substitutions to about 80 amino acid substitutions, about 40 amino acid substitutions to about 75 amino acid substitutions, about 40 amino acid substitutions to about 70 amino acid substitutions, about 40 amino acid substitutions to about 65 amino acid substitutions, about 40 amino acid substitutions to about 60 amino acid substitutions, about 40 amino acid substitutions to about 55 amino acid substitutions, about 40 amino acid substitutions to about 50 amino acid substitutions, about 40 amino acid substitutions to about 45 amino acid substitutions, between about 45 amino acid substitutions to about 160 amino acid substitutions, about 45 amino acid substitutions to about 155 amino acid substitutions, about 45 amino acid substitutions to about 150 amino acid substitutions, about 45 amino acid substitutions to about 145 amino acid substitutions, about 45 amino acid substitutions to about 140 amino acid substitutions, about 45 amino acid substitutions to about 135 amino acid substitutions, about 45 amino acid substitutions to about 130 amino acid substitutions, about 45 amino acid substitutions to about 125 amino acid substitutions, about 45 amino acid substitutions to about 120 amino acid substitutions, about 45 amino acid substitutions to about 115 amino acid substitutions, about 45 amino acid substitutions to about 110 amino acid substitutions, about 45 amino acid substitutions to about 105 amino acid substitutions, about 45 amino acid substitutions to about 100 amino acid substitutions, about 45 amino acid substitutions to about 95 amino acid substitutions, about 45 amino acid substitutions to about 90 amino acid substitutions, about 45 amino acid substitutions to about 85 amino acid substitutions, about 45 amino acid substitutions to about 80 amino acid substitutions, about 45 amino acid substitutions to about 75 amino acid substitutions, about 45 amino acid substitutions to about 70 amino acid substitutions, about 45 amino acid substitutions to about 65 amino acid substitutions, about 45 amino acid substitutions to about 60 amino acid substitutions, about 45 amino acid substitutions to about 55 amino acid substitutions, about 45 amino acid substitutions to about 50 amino acid substitutions, between about 50 amino acid substitutions to about 160 amino acid substitutions, about 50 amino acid substitutions to about 155 amino acid substitutions, about 50 amino acid substitutions to about 150 amino acid substitutions, about 50 amino acid substitutions to about 145 amino acid substitutions, about 50 amino acid substitutions to about 140 amino acid substitutions, about 50 amino acid substitutions to about 135 amino acid substitutions, about 50 amino acid substitutions to about 130 amino acid substitutions, about 50 amino acid substitutions to about 125 amino acid substitutions, about 50 amino acid substitutions to about 120 amino acid substitutions, about 50 amino acid substitutions to about 115 amino acid substitutions, about 50 amino acid substitutions to about 110 amino acid substitutions, about 50 amino acid substitutions to about 105 amino acid substitutions, about 50 amino acid substitutions to about 100 amino acid substitutions, about 50 amino acid substitutions to about 95 amino acid substitutions, about 50 amino acid substitutions to about 90 amino acid substitutions, about 50 amino acid substitutions to about 85 amino acid substitutions, about 50 amino acid substitutions to about 80 amino acid substitutions, about 50 amino acid substitutions to about 75 amino acid substitutions, about 50 amino acid substitutions to about 70 amino acid substitutions, about 50 amino acid substitutions to about 65 amino acid substitutions, about 50 amino acid substitutions to about 60 amino acid substitutions, about 50 amino acid substitutions to about 55 amino acid substitutions, between about 60 amino acid substitutions to about 160 amino acid substitutions, about 60 amino acid substitutions to about 155 amino acid substitutions, about 60 amino acid substitutions to about 150 amino acid substitutions, about 60 amino acid substitutions to about 145 amino acid substitutions, about 60 amino acid substitutions to about 140 amino acid substitutions, about 60 amino acid substitutions to about 135 amino acid substitutions, about 60 amino acid substitutions to about 130 amino acid substitutions, about 60 amino acid substitutions to about 125 amino acid substitutions, about 60 amino acid substitutions to about 120 amino acid substitutions, about 60 amino acid substitutions to about 115 amino acid substitutions, about 60 amino acid substitutions to about 110 amino acid substitutions, about 60 amino acid substitutions to about 105 amino acid substitutions, about 60 amino acid substitutions to about 100 amino acid substitutions, about 60 amino acid substitutions to about 95 amino acid substitutions, about 60 amino acid substitutions to about 90 amino acid substitutions, about 60 amino acid substitutions to about 85 amino acid substitutions, about 60 amino acid substitutions to about 80 amino acid substitutions, about 60 amino acid substitutions to about 75 amino acid substitutions, about 60 amino acid substitutions to about 70 amino acid substitutions, about 60 amino acid substitutions to about 65 amino acid substitutions, between about 70 amino acid substitutions to about 160 amino acid substitutions, about 70 amino acid substitutions to about 155 amino acid substitutions, about 70 amino acid substitutions to about 150 amino acid substitutions, about 70 amino acid substitutions to about 145 amino acid substitutions, about 70 amino acid substitutions to about 140 amino acid substitutions, about 70 amino acid substitutions to about 135 amino acid substitutions, about 70 amino acid substitutions to about 130 amino acid substitutions, about 70 amino acid substitutions to about 125 amino acid substitutions, about 70 amino acid substitutions to about 120 amino acid substitutions, about 70 amino acid substitutions to about 115 amino acid substitutions, about 70 amino acid substitutions to about 110 amino acid substitutions, about 70 amino acid substitutions to about 105 amino acid substitutions, about 70 amino acid substitutions to about 100 amino acid substitutions, about 70 amino acid substitutions to about 95 amino acid substitutions, about 70 amino acid substitutions to about 90 amino acid substitutions, about 70 amino acid substitutions to about 85 amino acid substitutions, about 70 amino acid substitutions to about 80 amino acid substitutions, about 70 amino acid substitutions to about 75 amino acid substitutions, between about 80 amino acid substitutions to about 160 amino acid substitutions, about 80 amino acid substitutions to about 155 amino acid substitutions, about 80 amino acid substitutions to about 150 amino acid substitutions, about 80 amino acid substitutions to about 145 amino acid substitutions, about 80 amino acid substitutions to about 140 amino acid substitutions, about 80 amino acid substitutions to about 135 amino acid substitutions, about 80 amino acid substitutions to about 130 amino acid substitutions, about 80 amino acid substitutions to about 125 amino acid substitutions, about 80 amino acid substitutions to about 120 amino acid substitutions, about 80 amino acid substitutions to about 115 amino acid substitutions, about 80 amino acid substitutions to about 110 amino acid substitutions, about 80 amino acid substitutions to about 105 amino acid substitutions, about 80 amino acid substitutions to about 100 amino acid substitutions, about 80 amino acid substitutions to about 95 amino acid substitutions, about 80 amino acid substitutions to about 90 amino acid substitutions, about 80 amino acid substitutions to about 85 amino acid substitutions, between about 90 amino acid substitutions to about 160 amino acid substitutions, about 90 amino acid substitutions to about 155 amino acid substitutions, about 90 amino acid substitutions to about 150 amino acid substitutions, about 90 amino acid substitutions to about 145 amino acid substitutions, about 90 amino acid substitutions to about 140 amino acid substitutions, about 90 amino acid substitutions to about 135 amino acid substitutions, about 90 amino acid substitutions to about 130 amino acid substitutions, about 90 amino acid substitutions to about 125 amino acid substitutions, about 90 amino acid substitutions to about 120 amino acid substitutions, about 90 amino acid substitutions to about 115 amino acid substitutions, about 90 amino acid substitutions to about 110 amino acid substitutions, about 90 amino acid substitutions to about 105 amino acid substitutions, about 90 amino acid substitutions to about 100 amino acid substitutions, about 90 amino acid substitutions to about 95 amino acid substitutions, between about 100 amino acid substitutions to about 160 amino acid substitutions, about 100 amino acid substitutions to about 155 amino acid substitutions, about 100 amino acid substitutions to about 150 amino acid substitutions, about 100 amino acid substitutions to about 145 amino acid substitutions, about 100 amino acid substitutions to about 140 amino acid substitutions, about 100 amino acid substitutions to about 135 amino acid substitutions, about 100 amino acid substitutions to about 130 amino acid substitutions, about 100 amino acid substitutions to about 125 amino acid substitutions, about 100 amino acid substitutions to about 120 amino acid substitutions, about 100 amino acid substitutions to about 115 amino acid substitutions, about 100 amino acid substitutions to about 110 amino acid substitutions, about 100 amino acid substitutions to about 105 amino acid substitutions, between about 110 amino acid substitutions to about 160 amino acid substitutions, about 110 amino acid substitutions to about 155 amino acid substitutions, about 110 amino acid substitutions to about 150 amino acid substitutions, about 110 amino acid substitutions to about 145 amino acid substitutions, about 110 amino acid substitutions to about 140 amino acid substitutions, about 110 amino acid substitutions to about 135 amino acid substitutions, about 110 amino acid substitutions to about 130 amino acid substitutions, about 110 amino acid substitutions to about 125 amino acid substitutions, about 110 amino acid substitutions to about 120 amino acid substitutions, about 110 amino acid substitutions to about 115 amino acid substitutions, between about 120 amino acid substitutions to about 160 amino acid substitutions, about 120 amino acid substitutions to about 155 amino acid substitutions, about 120 amino acid substitutions to about 150 amino acid substitutions, about 120 amino acid substitutions to about 145 amino acid substitutions, about 120 amino acid substitutions to about 140 amino acid substitutions, about 120 amino acid substitutions to about 135 amino acid substitutions, about 120 amino acid substitutions to about 130 amino acid substitutions, about 120 amino acid substitutions to about 125 amino acid substitutions, between about 130 amino acid substitutions to about 160 amino acid substitutions, about 130 amino acid substitutions to about 155 amino acid substitutions, about 130 amino acid substitutions to about 150 amino acid substitutions, about 130 amino acid substitutions to about 145 amino acid substitutions, about 130 amino acid substitutions to about 140 amino acid substitutions, about 130 amino acid substitutions to about 135 amino acid substitutions, between about 140 amino acid substitutions to about 160 amino acid substitutions, about 140 amino acid substitutions to about 155 amino acid substitutions, about 140 amino acid substitutions to about 150 amino acid substitutions, about 140 amino acid substitutions to about 145 amino acid substitutions, between about 150 amino acid substitutions to about 160 amino acid substitutions, or about 150 amino acid substitutions to about 155 amino acid substitutions. One skilled in the art would appreciate that amino acids that are conserved between wildtype supporting cell target proteins from different species or wildtype hair cell target proteins from different species can be mutated without losing activity, while those amino acids that are not conserved between wildtype supporting cell target proteins from different species or wildtype hair cell target proteins from different species should not be mutated as they are more likely (than amino acids that are not conserved between different species) to be involved in activity.

[0079] An active target protein (e.g., a supporting cell target protein or a hair cell target protein) can include, e.g., a sequence of a wildtype, full-length target protein (e.g., a supporting cell target protein (e.g., a wildtype, human, full-length supporting cell target protein) or a hair cell target protein (e.g., a wildtype, human, full-length hair cell target protein) that has 1 amino acid to about 50 amino acids, 1 amino acid to about 45 amino acids, 1 amino acid to about 40 amino acids, 1 amino acid to about 35 amino acids, 1 amino acid to about 30 amino acids, 1 amino acid to about 25 amino acids, 1 amino acid to about 20 amino acids, 1 amino acid to about 15 amino acids, 1 amino acid to about 10 amino acids, 1 amino acid to about 9 amino acids, 1 amino acid to about 8 amino acids, 1 amino acid to about 7 amino acids, 1 amino acid to about 6 amino acids, 1 amino acid to about 5 amino acids, 1 amino acid to about 4 amino acids, 1 amino acid to about 3 amino acids, about 2 amino acids to about 50 amino acids, about 2 amino acids to about 45 amino acids, about 2 amino acids to about 40 amino acids, about 2 amino acids to about 35 amino acids, about 2 amino acids to about 30 amino acids, about 2 amino acids to about 25 amino acids, about 2 amino acids to about 20 amino acids, about 2 amino acids to about 15 amino acids, about 2 amino acids to about 10 amino acids, about 2 amino acids to about 9 amino acids, about 2 amino acids to about 8 amino acids, about 2 amino acids to about 7 amino acids, about 2 amino acids to about 6 amino acids, about 2 amino acids to about 5 amino acids, about 2 amino acids to about 4 amino acids, about 3 amino acids to about 50 amino acids, about 3 amino acids to about 45 amino acids, about 3 amino acids to about 40 amino acids, about 3 amino acids to about 35 amino acids, about 3 amino acids to about 30 amino acids, about 3 amino acids to about 25 amino acids, about 3 amino acids to about 20 amino acids, about 3 amino acids to about 15 amino acids, about 3 amino acids to about 10 amino acids, about 3 amino acids to about 9 amino acids, about 3 amino acids to about 8 amino acids, about 3 amino acids to about 7 amino acids, about 3 amino acids to about 6 amino acids, about 3 amino acids to about 5 amino acids, about 4 amino acids to about 50 amino acids, about 4 amino acids to about 45 amino acids, about 4 amino acids to about 40 amino acids, about 4 amino acids to about 35 amino acids, about 4 amino acids to about 30 amino acids, about 4 amino acids to about 25 amino acids, about 4 amino acids to about 20 amino acids, about 4 amino acids to about 15 amino acids, about 4 amino acids to about 10 amino acids, about 4 amino acids to about 9 amino acids, about 4 amino acids to about 8 amino acids, about 4 amino acids to about 7 amino acids, about 4 amino acids to about 6 amino acids, about 5 amino acids to about 50 amino acids, about 5 amino acids to about 45 amino acids, about 5 amino acids to about 40 amino acids, about 5 amino acids to about 35 amino acids, about 5 amino acids to about 30 amino acids, about 5 amino acids to about 25 amino acids, about 5 amino acids to about 20 amino acids, about 5 amino acids to about 15 amino acids, about 5 amino acids to about 10 amino acids, about 5 amino acids to about 9 amino acids, about 5 amino acids to about 8 amino acids, about 5 amino acids to about 7 amino acids, about 6 amino acids to about 50 amino acids, about 6 amino acids to about 45 amino acids, about 6 amino acids to about 40 amino acids, about 6 amino acids to about 35 amino acids, about 6 amino acids to about 30 amino acids, about 6 amino acids to about 25 amino acids, about 6 amino acids to about 20 amino acids, about 6 amino acids to about 15 amino acids, about 6 amino acids to about 10 amino acids, about 6 amino acids to about 9 amino acids, about 6 amino acids to about 8 amino acids, about 7 amino acids to about 50 amino acids, about 7 amino acids to about 45 amino acids, about 7 amino acids to about 40 amino acids, about 7 amino acids to about 35 amino acids, about 7 amino acids to about 30 amino acids, about 7 amino acids to about 25 amino acids, about 7 amino acids to about 20 amino acids, about 7 amino acids to about 15 amino acids, about 7 amino acids to about 10 amino acids, about 7 amino acids to about 9 amino acids, about 8 amino acids to about 50 amino acids, about 8 amino acids to about 45 amino acids, about 8 amino acids to about 40 amino acids, about 8 amino acids to about 35 amino acids, about 8 amino acids to about 30 amino acids, about 8 amino acids to about 25 amino acids, about 8 amino acids to about 20 amino acids, about 8 amino acids to about 15 amino acids, about 8 amino acids to about 10 amino acids, about 10 amino acids to about 50 amino acids, about 10 amino acids to about 45 amino acids, about 10 amino acids to about 40 amino acids, about 10 amino acids to about 35 amino acids, about 10 amino acids to about 30 amino acids, about 10 amino acids to about 25 amino acids, about 10 amino acids to about 20 amino acids, about 10 amino acids to about 15 amino acids, about 15 amino acids to about 50 amino acids, about 15 amino acids to about 45 amino acids, about 15 amino acids to about 40 amino acids, about 15 amino acids to about 35 amino acids, about 15 amino acids to about 30 amino acids, about 15 amino acids to about 25 amino acids, about 15 amino acids to about 20 amino acids, about 20 amino acids to about 50 amino acids, about 20 amino acids to about 45 amino acids, about 20 amino acids to about 40 amino acids, about 20 amino acids to about 35 amino acids, about 20 amino acids to about 30 amino acids, about 20 amino acids to about 25 amino acids, about 25 amino acids to about 50 amino acids, about 25 amino acids to about 45 amino acids, about 25 amino acids to about 40 amino acids, about 25 amino acids to about 35 amino acids, about 25 amino acids to about 30 amino acids, about 30 amino acids to about 50 amino acids, about 30 amino acids to about 45 amino acids, about 30 amino acids to about 40 amino acids, about 30 amino acids to about 35 amino acids, about 35 amino acids to about 50 amino acids, about 35 amino acids to about 45 amino acids, about 35 amino acids to about 40 amino acids, about 40 amino acids to about 50 amino acids, about 40 amino acids to about 45 amino acids, about 45 amino acids to about 50 amino acids, deleted. In some embodiments where two or more amino acids are deleted from the sequence of a wildtype, full-length hair cell target protein, the two or more deleted amino acids can be contiguous in the sequence of the wildtype, full-length protein. In other examples where two or more amino acids are deleted from the sequence of a wildtype, full-length hair cell target protein, the two or more deleted amino acids are not contiguous in the sequence of the wildtype, full-length protein. One skilled in the art would appreciate that amino acids that are not conserved between wildtype, full-length hair cell target proteins from different species can be deleted without losing activity, while those amino acids that are conserved between wildtype, full-length hair cell target proteins from different species should not be deleted as they are more likely (than amino acids that are not conserved between different species) to be involved in activity.

[0080] In some embodiments where two or more amino acids are deleted from the sequence of a wildtype, full-length supporting cell target protein, the two or more deleted amino acids can be contiguous in the sequence of the wildtype, full-length protein. In other examples where two or more amino acids are deleted from the sequence of a wildtype, full-length supporting cell target protein, the two or more deleted amino acids are not contiguous in the sequence of the wildtype, full-length protein. One skilled in the art would appreciate that amino acids that are not conserved between wildtype, full-length supporting cell target proteins from different species can be deleted without losing activity, while those amino acids that are conserved between wildtype, full-length supporting cell target proteins from different species should not be deleted as they are more likely (than amino acids that are not conserved between different species) to be involved in activity.

[0081] In some examples, an active target protein (e.g., a supporting cell target protein or a hair cell target protein) can, e.g., include a sequence of a wildtype, full-length target protein (e.g., a wildtype, full-length supporting cell target protein or a wildtype, full-length hair cell target protein) that has between 1 amino acid to about 100 amino acids, 1 amino acid to about 95 amino acids, 1 amino acid to about 90 amino acids, 1 amino acid to about 85 amino acids, 1 amino acid to about 80 amino acids, 1 amino acid to about 75 amino acids, 1 amino acid to about 70 amino acids, 1 amino acid to about 65 amino acids, 1 amino acid to about 60 amino acids, 1 amino acid to about 55 amino acids, 1 amino acid to about 50 amino acids, 1 amino acid to about 45 amino acids, 1 amino acid to about 40 amino acids, 1 amino acid to about 35 amino acids, 1 amino acid to about 30 amino acids, 1 amino acid to about 25 amino acids, 1 amino acid to about 20 amino acids, 1 amino acid to about 15 amino acids, 1 amino acid to about 10 amino acids, 1 amino acid to about 9 amino acids, 1 amino acid to about 8 amino acids, 1 amino acid to about 7 amino acids, 1 amino acid to about 6 amino acids, 1 amino acid to about 5 amino acids, 1 amino acid to about 4 amino acids, 1 amino acid to about 3 amino acids, about 2 amino acids to about 100 amino acids, about 2 amino acid to about 95 amino acids, about 2 amino acids to about 90 amino acids, about 2 amino acids to about 85 amino acids, about 2 amino acids to about 80 amino acids, about 2 amino acids to about 75 amino acids, about 2 amino acids to about 70 amino acids, about 2 amino acids to about 65 amino acids, about 2 amino acids to about 60 amino acids, about 2 amino acids to about 55 amino acids, about 2 amino acids to about 50 amino acids, about 2 amino acids to about 45 amino acids, about 2 amino acids to about 40 amino acids, about 2 amino acids to about 35 amino acids, about 2 amino acids to about 30 amino acids, about 2 amino acids to about 25 amino acids, about 2 amino acids to about 20 amino acids, about 2 amino acids to about 15 amino acids, about 2 amino acids to about 10 amino acids, about 2 amino acids to about 9 amino acids, about 2 amino acids to about 8 amino acids, about 2 amino acids to about 7 amino acids, about 2 amino acids to about 6 amino acids, about 2 amino acids to about 5 amino acids, about 2 amino acids to about 4 amino acids, about 3 amino acids to about 100 amino acids, about 3 amino acid to about 95 amino acids, about 3 amino acids to about 90 amino acids, about 3 amino acids to about 85 amino acids, about 3 amino acids to about 80 amino acids, about 3 amino acids to about 75 amino acids, about 3 amino acids to about 70 amino acids, about 3 amino acids to about 65 amino acids, about 3 amino acids to about 60 amino acids, about 3 amino acids to about 55 amino acids, about 3 amino acids to about 50 amino acids, about 3 amino acids to about 45 amino acids, about 3 amino acids to about 40 amino acids, about 3 amino acids to about 35 amino acids, about 3 amino acids to about 30 amino acids, about 3 amino acids to about 25 amino acids, about 3 amino acids to about 20 amino acids, about 3 amino acids to about 15 amino acids, about 3 amino acids to about 10 amino acids, about 3 amino acids to about 9 amino acids, about 3 amino acids to about 8 amino acids, about 3 amino acids to about 7 amino acids, about 3 amino acids to about 6 amino acids, about 3 amino acids to about 5 amino acids, about 4 amino acids to about 100 amino acids, about 4 amino acid to about 95 amino acids, about 4 amino acids to about 90 amino acids, about 4 amino acids to about 85 amino acids, about 4 amino acids to about 80 amino acids, about 4 amino acids to about 75 amino acids, about 4 amino acids to about 70 amino acids, about 4 amino acids to about 65 amino acids, about 4 amino acids to about 60 amino acids, about 4 amino acids to about 55 amino acids, about 4 amino acids to about 50 amino acids, about 4 amino acids to about 45 amino acids, about 4 amino acids to about 40 amino acids, about 4 amino acids to about 35 amino acids, about 4 amino acids to about 30 amino acids, about 4 amino acids to about 25 amino acids, about 4 amino acids to about 20 amino acids, about 4 amino acids to about 15 amino acids, about 4 amino acids to about 10 amino acids, about 4 amino acids to about 9 amino acids, about 4 amino acids to about 8 amino acids, about 4 amino acids to about 7 amino acids, about 4 amino acids to about 6 amino acids, about 5 amino acids to about 100 amino acids, about 5 amino acid to about 95 amino acids, about 5 amino acids to about 90 amino acids, about 5 amino acids to about 85 amino acids, about 5 amino acids to about 80 amino acids, about 5 amino acids to about 75 amino acids, about 5 amino acids to about 70 amino acids, about 5 amino acids to about 65 amino acids, about 5 amino acids to about 60 amino acids, about 5 amino acids to about 55 amino acids, about 5 amino acids to about 50 amino acids, about 5 amino acids to about 45 amino acids, about 5 amino acids to about 40 amino acids, about 5 amino acids to about 35 amino acids, about 5 amino acids to about 30 amino acids, about 5 amino acids to about 25 amino acids, about 5 amino acids to about 20 amino acids, about 5 amino acids to about 15 amino acids, about 5 amino acids to about 10 amino acids, about 5 amino acids to about 9 amino acids, about 5 amino acids to about 8 amino acids, about 5 amino acids to about 7 amino acids, about 6 amino acids to about 100 amino acids, about 6 amino acid to about 95 amino acids, about 6 amino acids to about 90 amino acids, about 6 amino acids to about 85 amino acids, about 6 amino acids to about 80 amino acids, about 6 amino acids to about 75 amino acids, about 6 amino acids to about 70 amino acids, about 6 amino acids to about 65 amino acids, about 6 amino acids to about 60 amino acids, about 6 amino acids to about 55 amino acids, about 6 amino acids to about 50 amino acids, about 6 amino acids to about 45 amino acids, about 6 amino acids to about 40 amino acids, about 6 amino acids to about 35 amino acids, about 6 amino acids to about 30 amino acids, about 6 amino acids to about 25 amino acids, about 6 amino acids to about 20 amino acids, about 6 amino acids to about 15 amino acids, about 6 amino acids to about 10 amino acids, about 6 amino acids to about 9 amino acids, about 6 amino acids to about 8 amino acids, about 7 amino acids to about 100 amino acids, about 7 amino acid to about 95 amino acids, about 7 amino acids to about 90 amino acids, about 7 amino acids to about 85 amino acids, about 7 amino acids to about 80 amino acids, about 7 amino acids to about 75 amino acids, about 7 amino acids to about 70 amino acids, about 7 amino acids to about 65 amino acids, about 7 amino acids to about 60 amino acids, about 7 amino acids to about 55 amino acids, about 7 amino acids to about 50 amino acids, about 7 amino acids to about 45 amino acids, about 7 amino acids to about 40 amino acids, about 7 amino acids to about 35 amino acids, about 7 amino acids to about 30 amino acids, about 7 amino acids to about 25 amino acids, about 7 amino acids to about 20 amino acids, about 7 amino acids to about 15 amino acids, about 7 amino acids to about 10 amino acids, about 7 amino acids to about 9 amino acids, about 8 amino acids to about 100 amino acids, about 8 amino acid to about 95 amino acids, about 8 amino acids to about 90 amino acids, about 8 amino acids to about 85 amino acids, about 8 amino acids to about 80 amino acids, about 8 amino acids to about 75 amino acids, about 8 amino acids to about 70 amino acids, about 8 amino acids to about 65 amino acids, about 8 amino acids to about 60 amino acids, about 8 amino acids to about 55 amino acids, about 8 amino acids to about 50 amino acids, about 8 amino acids to about 45 amino acids, about 8 amino acids to about 40 amino acids, about 8 amino acids to about 35 amino acids, about 8 amino acids to about 30 amino acids, about 8 amino acids to about 25 amino acids, about 8 amino acids to about 20 amino acids, about 8 amino acids to about 15 amino acids, about 8 amino acids to about 10 amino acids, about 10 amino acids to about 100 amino acids, about 10 amino acid to about 95 amino acids, about 10 amino acids to about 90 amino acids, about 10 amino acids to about 85 amino acids, about 10 amino acids to about 80 amino acids, about 10 amino acids to about 75 amino acids, about 10 amino acids to about 70 amino acids, about 10 amino acids to about 65 amino acids, about 10 amino acids to about 60 amino acids, about 10 amino acids to about 55 amino acids, about 10 amino acids to about 50 amino acids, about 10 amino acids to about 45 amino acids, about 10 amino acids to about 40 amino acids, about 10 amino acids to about 35 amino acids, about 10 amino acids to about 30 amino acids, about 10 amino acids to about 25 amino acids, about 10 amino acids to about 20 amino acids, about 10 amino acids to about 15 amino acids, about 20 amino acids to about 100 amino acids, about 20 amino acid to about 95 amino acids, about 20 amino acids to about 90 amino acids, about 20 amino acids to about 85 amino acids, about 20 amino acids to about 80 amino acids, about 20 amino acids to about 75 amino acids, about 20 amino acids to about 70 amino acids, about 20 amino acids to about 65 amino acids, about 20 amino acids to about 60 amino acids, about 20 amino acids to about 55 amino acids, about 20 amino acids to about 50 amino acids, about 20 amino acids to about 45 amino acids, about 20 amino acids to about 40 amino acids, about 20 amino acids to about 35 amino acids, about 20 amino acids to about 30 amino acids, about 20 amino acids to about 25 amino acids, about 30 amino acids to about 100 amino acids, about 30 amino acid to about 95 amino acids, about 30 amino acids to about 90 amino acids, about 30 amino acids to about 85 amino acids, about 30 amino acids to about 80 amino acids, about 30 amino acids to about 75 amino acids, about 30 amino acids to about 70 amino acids, about 30 amino acids to about 65 amino acids, about 30 amino acids to about 60 amino acids, about 30 amino acids to about 55 amino acids, about 30 amino acids to about 50 amino acids, about 30 amino acids to about 45 amino acids, about 30 amino acids to about 40 amino acids, about 30 amino acids to about 35 amino acids, about 40 amino acids to about 100 amino acids, about 40 amino acid to about 95 amino acids, about 40 amino acids to about 90 amino acids, about 40 amino acids to about 85 amino acids, about 40 amino acids to about 80 amino acids, about 40 amino acids to about 75 amino acids, about 40 amino acids to about 70 amino acids, about 40 amino acids to about 65 amino acids, about 40 amino acids to about 60 amino acids, about 40 amino acids to about 55 amino acids, about 40 amino acids to about 50 amino acids, about 40 amino acids to about 45 amino acids, about 50 amino acids to about 100 amino acids, about 50 amino acid to about 95 amino acids, about 50 amino acids to about 90 amino acids, about 50 amino acids to about 85 amino acids, about 50 amino acids to about 80 amino acids, about 50 amino acids to about 75 amino acids, about 50 amino acids to about 70 amino acids, about 50 amino acids to about 65 amino acids, about 50 amino acids to about 60 amino acids, about 50 amino acids to about 55 amino acids, about 60 amino acids to about 100 amino acids, about 60 amino acid to about 95 amino acids, about 60 amino acids to about 90 amino acids, about 60 amino acids to about 85 amino acids, about 60 amino acids to about 80 amino acids, about 60 amino acids to about 75 amino acids, about 60 amino acids to about 70 amino acids, about 60 amino acids to about 65 amino acids, about 70 amino acids to about 100 amino acids, about 70 amino acid to about 95 amino acids, about 70 amino acids to about 90 amino acids, about 70 amino acids to about 85 amino acids, about 70 amino acids to about 80 amino acids, about 70 amino acids to about 75 amino acids, about 80 amino acids to about 100 amino acids, about 80 amino acid to about 95 amino acids, about 80 amino acids to about 90 amino acids, about 80 amino acids to about 85 amino acids, about 90 amino acids to about 100 amino acids, about 90 amino acids to about 95 amino acids, or about 95 amino acids to about 100 amino acids, removed from its N-terminus and/or 1 amino acid to 100 amino acids (or any of the subranges of this range described herein) removed from its C-terminus.

[0082] In some embodiments, an active target protein (e.g., a supporting cell target protein or a hair cell target protein) can, e.g., include the sequence of a wildtype, full-length target protein (e.g., a wildtype, full-length supporting cell target protein or a wildtype, full-length hair cell target protein) where 1 amino acid to 50 amino acids, 1 amino acid to 45 amino acids, 1 amino acid to 40 amino acids, 1 amino acid to 35 amino acids, 1 amino acid to 30 amino acids, 1 amino acid to 25 amino acids, 1 amino acid to 20 amino acids, 1 amino acid to 15 amino acids, 1 amino acid to 10 amino acids, 1 amino acid to 9 amino acids, 1 amino acid to 8 amino acids, 1 amino acid to 7 amino acids, 1 amino acid to 6 amino acids, 1 amino acid to 5 amino acids, 1 amino acid to 4 amino acids, 1 amino acid to 3 amino acids, about 2 amino acids to 50 amino acids, about 2 amino acids to 45 amino acids, about 2 amino acids to 40 amino acids, about 2 amino acids to 35 amino acids, about 2 amino acids to 30 amino acids, about 2 amino acids to 25 amino acids, about 2 amino acids to 20 amino acids, about 2 amino acids to 15 amino acids, about 2 amino acids to 10 amino acids, about 2 amino acids to 9 amino acids, about 2 amino acids to 8 amino acids, about 2 amino acids to 7 amino acids, about 2 amino acids to 6 amino acids, about 2 amino acids to 5 amino acids, about 2 amino acids to 4 amino acids, about 3 amino acids to 50 amino acids, about 3 amino acids to 45 amino acids, about 3 amino acids to 40 amino acids, about 3 amino acids to 35 amino acids, about 3 amino acids to 30 amino acids, about 3 amino acids to 25 amino acids, about 3 amino acids to 20 amino acids, about 3 amino acids to 15 amino acids, about 3 amino acids to 10 amino acids, about 3 amino acids to 9 amino acids, about 3 amino acids to 8 amino acids, about 3 amino acids to 7 amino acids, about 3 amino acids to 6 amino acids, about 3 amino acids to 5 amino acids, about 4 amino acids to 50 amino acids, about 4 amino acids to 45 amino acids, about 4 amino acids to 40 amino acids, about 4 amino acids to 35 amino acids, about 4 amino acids to 30 amino acids, about 4 amino acids to 25 amino acids, about 4 amino acids to 20 amino acids, about 4 amino acids to 15 amino acids, about 4 amino acids to 10 amino acids, about 4 amino acids to 9 amino acids, about 4 amino acids to 8 amino acids, about 4 amino acids to 7 amino acids, about 4 amino acids to 6 amino acids, about 5 amino acids to 50 amino acids, about 5 amino acids to 45 amino acids, about 5 amino acids to 40 amino acids, about 5 amino acids to 35 amino acids, about 5 amino acids to 30 amino acids, about 5 amino acids to 25 amino acids, about 5 amino acids to 20 amino acids, about 5 amino acids to 15 amino acids, about 5 amino acids to 10 amino acids, about 5 amino acids to 9 amino acids, about 5 amino acids to 8 amino acids, about 5 amino acids to 7 amino acids, about 6 amino acids to 50 amino acids, about 6 amino acids to 45 amino acids, about 6 amino acids to 40 amino acids, about 6 amino acids to 35 amino acids, about 6 amino acids to 30 amino acids, about 6 amino acids to 25 amino acids, about 6 amino acids to 20 amino acids, about 6 amino acids to 15 amino acids, about 6 amino acids to 10 amino acids, about 6 amino acids to 9 amino acids, about 6 amino acids to 8 amino acids, about 7 amino acids to 50 amino acids, about 7 amino acids to 45 amino acids, about 7 amino acids to 40 amino acids, about 7 amino acids to 35 amino acids, about 7 amino acids to 30 amino acids, about 7 amino acids to 25 amino acids, about 7 amino acids to 20 amino acids, about 7 amino acids to 15 amino acids, about 7 amino acids to 10 amino acids, about 7 amino acids to 9 amino acids, about 8 amino acids to 50 amino acids, about 8 amino acids to 45 amino acids, about 8 amino acids to 40 amino acids, about 8 amino acids to 35 amino acids, about 8 amino acids to 30 amino acids, about 8 amino acids to 25 amino acids, about 8 amino acids to 20 amino acids, about 8 amino acids to 15 amino acids, about 8 amino acids to 10 amino acids, about 10 amino acids to 50 amino acids, about 10 amino acids to 45 amino acids, about 10 amino acids to 40 amino acids, about 10 amino acids to 35 amino acids, about 10 amino acids to 30 amino acids, about 10 amino acids to 25 amino acids, about 10 amino acids to 20 amino acids, about 10 amino acids to 15 amino acids, about 15 amino acids to 50 amino acids, about 15 amino acids to 45 amino acids, about 15 amino acids to 40 amino acids, about 15 amino acids to 35 amino acids, about 15 amino acids to 30 amino acids, about 15 amino acids to 25 amino acids, about 15 amino acids to 20 amino acids, about 20 amino acids to 50 amino acids, about 20 amino acids to 45 amino acids, about 20 amino acids to 40 amino acids, about 20 amino acids to 35 amino acids, about 20 amino acids to 30 amino acids, about 20 amino acids to 25 amino acids, about 25 amino acids to 50 amino acids, about 25 amino acids to 45 amino acids, about 25 amino acids to 40 amino acids, about 25 amino acids to 35 amino acids, about 25 amino acids to 30 amino acids, about 30 amino acids to 50 amino acids, about 30 amino acids to 45 amino acids, about 30 amino acids to 40 amino acids, about 30 amino acids to 35 amino acids, about 35 amino acids to 50 amino acids, about 35 amino acids to 45 amino acids, about 35 amino acids to 40 amino acids, about 40 amino acids to 50 amino acids, about 40 amino acids to 45 amino acids, or about 45 amino acids to about 50 amino acids, are inserted. In some examples, the 1 amino acid to 50 amino acids (or any subrange thereof) can be inserted as a contiguous sequence into the sequence of a wildtype, full-length protein. In some examples, the 1 amino acid to 50 amino acids (or any subrange thereof) are not inserted as a contiguous sequence into the sequence of a wildtype, full-length protein. As can be appreciated in the art, the 1 amino acid to 50 amino acids can be inserted into a portion of the sequence of a wildtype, full-length protein that is not well-conserved between species.

[0083] Unless otherwise defined, all technical and scientific terms used herein have the same meaning as commonly understood by one of ordinary skill in the art to which this invention belongs. Methods and materials are described herein for use in the present invention; other suitable methods and materials known in the art can also be used. The materials, methods, and examples are illustrative only and not intended to be limiting. All publications, patent applications, patents, sequences, database entries, and other references mentioned herein are incorporated by reference in their entirety. In case of conflict, the present specification, including definitions, will control.

### BRIEF DESCRIPTION OF DRAWINGS

[0084] FIG. 1A is a representative image of Myo7a/Iba-1 immunofluorescent staining of cochlear tissue of a cynomolgus macaque (non-human primate) following administration of a single Anc80-GFP AAV vector directly into the inner ear through the round window.

[0085] FIG. 1B is a representative image of Anc80-GFP immunofluorescent staining of the same cochlear tissue of the cynomolgus macaque as in FIG. 1A.

[0086] FIG. 1C is a representative image of a merged immunofluorescent staining of Myo7a/Iba-1 and Anc80-GFP of the same cochlear tissue of the cynomolgus macaque as in FIG. 1A.

### DETAILED DESCRIPTION

[0087] Provided herein are compositions that include at least two different nucleic acid vectors, where: each of the at least two different adeno-associated virus (AAV) vectors includes a coding sequence that encodes a different portion of a supporting cell target protein, each of the encoded portions being at least 30 amino acid residues in length, where the amino acid sequence of each of the encoded portions may optionally partially overlap with the amino acid sequence of a different one of the encoded portions; no single vector of the at least two different vectors encodes the full-length supporting cell target protein; at least one of the coding sequences includes a nucleotide sequence spanning two neighboring exons of the supporting cell target genomic DNA, and lacks an intronic sequence between the two neighboring exons; and when introduced into a primate cell the at least two different vectors undergo concatamerization or homologous recombination with each other, thereby forming a recombined nucleic acid that encodes a full-length supporting cell target protein.

[0088] Provided herein are compositions including two different nucleic acid vectors, where: a first nucleic acid vector of the two different nucleic acid vectors includes a promoter, a first coding sequence that encodes an N-terminal portion of a supporting cell target protein positioned 3′ of the promoter, and a splicing donor signal sequence positioned at the 3′ end of the first coding sequence; and a second nucleic acid vector of the two different nucleic acid vectors includes a splicing acceptor signal sequence, a second coding sequence that encodes a C-terminal portion of a supporting cell target protein positioned at the 3′ end of the splicing acceptor signal sequence, and a polyadenylation sequence at the 3′ end of the second coding sequence; where each of the encoded portions is at least 30 amino acid residues in length, where the amino acid sequences of the encoded portions do not overlap, where no single vector of the two different vectors encodes the full-length supporting cell target protein, and, when the coding sequences are transcribed in a primate cell, to produce RNA transcripts, splicing occurs between the splicing donor signal sequence on one transcript and the splicing acceptor signal sequence on the other transcript, thereby forming a recombined RNA molecule that encodes a full-length supporting cell target protein.

[0089] Provided herein are compositions including: a first nucleic acid vector including a promoter, a first coding sequence that encodes an N-terminal portion of a supporting cell target protein positioned 3′ of the promoter, a splicing donor signal sequence positioned at the 3′ end of the first coding sequence, and a first detectable marker gene positioned 3′ of the splicing donor signal sequence; and a second nucleic acid vector, different from the first nucleic acid vector, including a second detectable marker gene, a splicing acceptor signal sequence positioned 3′ of the second detectable marker gene, a second coding sequence that encodes a C-terminal portion of a supporting cell target protein positioned at the 3′ end of the splicing acceptor signal sequence, and a polyadenylation sequence positioned at the 3′ end of the second coding sequence; where each of the encoded portions is at least 30 amino acid residues in length, where the respective amino acid sequences of the encoded portions do not overlap with each other, where no single vector of the two different vectors encodes the full-length supporting cell target protein, and, when the coding sequences are transcribed in a primate cell to produce RNA transcripts, splicing occurs between the splicing donor signal on one transcript and the splicing acceptor signal on the other transcript, thereby forming a recombined RNA molecule that encodes a full-length supporting cell target protein.

[0090] Provided herein are compositions including: a first nucleic acid vector including a promoter, a first coding sequence that encodes an N-terminal portion of a supporting cell target protein positioned 3′ to the promoter, a splicing donor signal sequence positioned at the 3′ end of the first coding sequence, and a F1 phage recombinogenic region positioned 3′ to the splicing donor signal sequence; and a second nucleic acid vector, different from the first nucleic acid vector, including a second F1 phage recombinogenic region, a splicing acceptor signal sequence positioned 3′ of the second F1 phage recombinogenic region, a second coding sequence that encodes a C-terminal portion of a supporting cell target protein positioned at the 3′ end of the splicing acceptor signal sequence, and a polyadenylation sequence positioned at the 3′ end of the second coding sequence; where each of the encoded portions is at least 30 amino acid residues in length, where the respective amino acid sequences of the encoded portions do not overlap with each other, where no single vector of the two different vectors encodes the full-length supporting cell target protein, and, when the coding sequences are transcribed in a primate cell to produce RNA transcripts, splicing occurs between the splicing donor signal one transcript and the splicing acceptor signal on the other transcript, thereby forming a recombined RNA molecule that encodes a full-length supporting cell target protein.

[0091] Provided herein are compositions including a single adeno-associated virus (AAV) vector, where the single AAV vector that includes a nucleic acid sequence that encodes a supporting cell target protein; and when introduced into a primate cell, a nucleic acid encoding a full-length supporting cell target protein is generated at the locus of the supporting cell target gene, and the primate expresses the supporting cell target protein.

[0092] Provided herein are compositions that include at least two different nucleic acid vectors, where: each of the at least two different adeno-associated virus (AAV) vectors includes a coding sequence that encodes a different portion of a hair cell target protein, each of the encoded portions being at least 30 amino acid residues in length, where the amino acid sequence of each of the encoded portions may optionally partially overlap with the amino acid sequence of a different one of the encoded portions; no single vector of the at least two different vectors encodes the full-length hair cell target protein; at least one of the coding sequences includes a nucleotide sequence spanning two neighboring exons of the hair cell target genomic DNA, and lacks an intronic sequence between the two neighboring exons; and when introduced into a primate cell the at least two different vectors undergo concatamerization or homologous recombination with each other, thereby forming a recombined nucleic acid that encodes a full-length hair cell target protein.

[0093] Provided herein are compositions including two different nucleic acid vectors, where: a first nucleic acid vector of the two different nucleic acid vectors includes a promoter, a first coding sequence that encodes an N-terminal portion of a hair cell target protein positioned 3′ of the promoter, and a splicing donor signal sequence positioned at the 3′ end of the first coding sequence; and a second nucleic acid vector of the two different nucleic acid vectors includes a splicing acceptor signal sequence, a second coding sequence that encodes a C-terminal portion of a hair cell target protein positioned at the 3′ end of the splicing acceptor signal sequence, and a polyadenylation sequence at the 3′ end of the second coding sequence; where each of the encoded portions is at least 30 amino acid residues in length, where the amino acid sequences of the encoded portions do not overlap, where no single vector of the two different vectors encodes the full-length hair cell target protein, and, when the coding sequences are transcribed in a primate cell, to produce RNA transcripts, splicing occurs between the splicing donor signal sequence on one transcript and the splicing acceptor signal sequence on the other transcript, thereby forming a recombined RNA molecule that encodes a full-length hair cell target protein.

[0094] Provided herein are compositions including: a first nucleic acid vector including a promoter, a first coding sequence that encodes an N-terminal portion of a hair cell target protein positioned 3′ of the promoter, a splicing donor signal sequence positioned at the 3′ end of the first coding sequence, and a first detectable marker gene positioned 3′ of the splicing donor signal sequence; and a second nucleic acid vector, different from the first nucleic acid vector, including a second detectable marker gene, a splicing acceptor signal sequence positioned 3′ of the second detectable marker gene, a second coding sequence that encodes a C-terminal portion of a hair cell target protein positioned at the 3′ end of the splicing acceptor signal sequence, and a polyadenylation sequence positioned at the 3′ end of the second coding sequence; where each of the encoded portions is at least 30 amino acid residues in length, where the respective amino acid sequences of the encoded portions do not overlap with each other, where no single vector of the two different vectors encodes the full-length hair cell target protein, and, when the coding sequences are transcribed in a primate cell to produce RNA transcripts, splicing occurs between the splicing donor signal on one transcript and the splicing acceptor signal on the other transcript, thereby forming a recombined RNA molecule that encodes a full-length hair cell target protein.

[0095] Provided herein are compositions including: a first nucleic acid vector including a promoter, a first coding sequence that encodes an N-terminal portion of a hair cell target protein positioned 3′ to the promoter, a splicing donor signal sequence positioned at the 3′ end of the first coding sequence, and a F1 phage recombinogenic region positioned 3′ to the splicing donor signal sequence; and a second nucleic acid vector, different from the first nucleic acid vector, including a second F1 phage recombinogenic region, a splicing acceptor signal sequence positioned 3′ of the second F1 phage recombinogenic region, a second coding sequence that encodes a C-terminal portion of a hair cell target protein positioned at the 3′ end of the splicing acceptor signal sequence, and a polyadenylation sequence positioned at the 3′ end of the second coding sequence; where each of the encoded portions is at least 30 amino acid residues in length, where the respective amino acid sequences of the encoded portions do not overlap with each other, where no single vector of the two different vectors encodes the full-length hair cell target protein, and, when the coding sequences are transcribed in a primate cell to produce RNA transcripts, splicing occurs between the splicing donor signal one transcript and the splicing acceptor signal on the other transcript, thereby forming a recombined RNA molecule that encodes a full-length hair cell target protein.

[0096] Also provided herein are compositions including a single adeno-associated virus (AAV) vector, where the single AAV vector that includes a nucleic acid sequence that encodes a hair cell target protein; and when introduced into a primate cell, a nucleic acid encoding a full-length hair cell target protein is generated at the locus of the hair cell target gene, and the primate expresses the hair cell target protein.

[0097] Also provided are kits that include any of the compositions described herein. Also provided herein are methods that include introducing into a cochlea of a mammal a therapeutically effective amount of any of the compositions described herein.

[0098] Also provided are methods of correcting a supporting cell target gene defect in a supporting cell of an inner ear in a primate that include: administering to the inner ear of the primate a therapeutically effective amount of any of the compositions described herein, where the administering repairs the supporting cell target gene defect in the supporting cell of the inner ear of the primate.

[0099] Also provided are methods of correcting a hair cell target gene defect in a hair cell of an inner ear in a primate that include: administering to the inner ear of the primate a therapeutically effective amount of any of the compositions described herein, where the administering repairs the hair cell target gene defect in the hair cell of the inner ear of the primate.

[0100] Also provided herein are methods of increasing the expression level of a supporting cell target protein in a supporting cell of an inner ear of a primate that include: administering to the inner ear of the primate a therapeutically effective amount of any of the compositions described herein, where the administering results in an increase in the expression level of the supporting cell target protein in the supporting cell of the inner ear of the primate.

[0101] Also provided herein are methods of increasing the expression level of a hair cell target protein in a hair cell of an inner ear of a primate that include: administering to the inner ear of the primate a therapeutically effective amount of any of the compositions described herein, where the administering results in an increase in the expression level of the hair cell target protein in the hair cell of the inner ear of the primate.

[0102] Also provided herein are methods of treating hearing loss, e.g., non-syndromic sensorineural hearing loss or syndromic sensorineural hearing loss, in a primate identified as having a defective supporting cell target gene that include: administering to the inner ear of the primate a therapeutically effective amount of any of the compositions described herein.

[0103] Also provided herein are methods of treating hearing loss, e.g., non-syndromic sensorineural hearing loss or syndromic sensorineural hearing loss, in a primate identified as having a defective hair cell target gene that include: administering to the inner ear of the primate a therapeutically effective amount of any of the compositions described herein.

[0104] Also provided herein are methods of restoring hearing in a primate identified or diagnosed as having hearing loss that include: administering to the inner ear of the primate a therapeutically effective amount of any of the compositions described herein.

[0105] Also provided herein are methods of restoring synapses and/or preserving spiral ganglion nerves in a primate identified or diagnosed as having an inner ear disorder that include: administering to the inner ear of the primate a therapeutically effective amount of any of the compositions described herein.

[0106] Also provided herein are methods that include administering to an inner ear of a primate a therapeutically effective amount of any of the compositions described herein.

[0107] Additional non-limiting aspects of the compositions, kits, and methods are described herein and can be used in any combination without limitation.

### Gap Junction Protein Beta 2 (GJB2)

[0108] The GJB2 gene encodes gap junction protein beta 2, a member of the gap junction protein family. Gap junction proteins are specialized proteins, also called connexins, involved in intracellular communication. Mutations in GJB2 have been associated with hearing loss and deafness (Amorini et al., Ann. Hum. Genet. 79(5):341-349, 2015; Qing et al., Genet. Test Mol. Biomarkers 19(1):52-58, 2015).

[0109] The human GJB2 gene is located on chromosome 13q12. It contains 2 exons encompassing ˜5 kilobases (kb) (NCBI Accession No. NG008358.1). The full-length wildtype GJB2 protein expressed from the human GJB2 gene is 226 amino acids in length.

[0110] Various mutations in the GJB2 gene have been associated with hearing loss (e.g., non-syndromic sensorineural hearing loss or syndromic sensorineural hearing loss). For example, the c.35delG allele was found on 65.5% of patients from Eastern Sicily (Amorini et al., Ann. Hum. Genet. 79(5):341-349, 2015).

[0111] Additional exemplary mutations in a GJB2 gene detected in subjects having non-syndromic sensorineural hearing loss or syndromic sensorineural hearing loss, and methods of sequencing a nucleic acid encoding GJB2 are described in, e.g., Snoeckx et al., Am. J. Hum. Genet 77: 945-957, 2005; Welch et al., Am. J. Med. Genet A 143: 1567-1573, 2007; and Zelante et al., Hum. Mol. Genet. 6:1605-1609, 1997. Methods of detecting mutations in a gene are well-known in the art. Non-limiting examples of such techniques include: real-time polymerase chain reaction (RT-PCR), PCR, sequencing, Southern blotting, and Northern blotting.

[0112] An exemplary human wildtype GJB2 protein is or includes the sequence of SEQ ID NO: 1. Non-limiting examples of nucleic acid encoding a wildtype GJB2 protein are or include SEQ ID NO: 2. As can be appreciated in the art, at least some or all of the codons in SEQ ID NO: 2 can be codon-optimized to allow for optimal expression in a non-human mammal.

[0113] In some embodiments of any of the compositions described herein, the GJB2 protein comprises a sequence that is at least 75% (e.g., at least 80%, at least 85%, at least 90%, at least 91%, at least 92%, at least 93%, at least 94%, at least 95%, at least 96%, at least 97%, at least 98%, at least 99%) identical to SEQ ID NO: 1.

Human Full-length Wildtype GJB2 Protein
(SEQ ID NO: 1)
MDWGTLQTILGGVNKHSTSIGKIWLTVLFIFRIMILVVAAKEVWGDEQAD
FVCNTLQPGCKNVCYDHYFPISHIRLWALQLIFVSTPALLVAMHVAYRRH
EKKRKFIKGEIKSEFKDIEEIKTQKVRIEGSLWWTYTSSIFFRVIFEAAF
MYVFYVMYDGFSMQRLVKCNAWPCPNTVDCFVSRPTEKTVFTVFMIAVSG
ICILLNVTELCYLLIRYCSGKSKKPV
Human Wildtype GJB2 cDNA
(SEQ ID NO: 2)
atggattggggcacgctgcagacgatcctggggggtgtgaacaaacactc
caccagcattggaaagatctggctcaccgtcctcttcatttttcgcatta
tgatcctcgttgtggctgcaaaggaggtgtggggagatgagcaggccgac
tttgtctgcaacaccctgcagccaggctgcaagaacgtgtgctacgatca
ctacttccccatctcccacatccggctatgggccctgcagctgatcttcg
tgtccacgccagcgctcctagtggccatgcacgtggcctaccggagacat
gagaagaagaggaagttcatcaagggggagataaagagtgaatttaagga
catcgaggagatcaaaacccagaaggtccgcatcgaaggctccctgtggt
ggacctacacaagcagcatcttcttccgggtcatcttcgaagccgccttc
atgtacgtcttctatgtcatgtacgacggcttctccatgcagcggctggt
gaagtgcaacgcctggccttgtcccaacactgtggactgctttgtgtccc
ggcccacggagaagactgtcttcacagtgttcatgattgcagtgtctgga
atttgcatcctgctgaatgtcactgaattgtgttatttgctaattagata
ttgttctgggaagtcaaaaaagccagtttaa

[0114] A non-limiting example of a human wildtype GJB2 genomic DNA sequence is SEQ ID NO: 3. The exons in SEQ ID NO: 3 are: nucleotide positions 1-156 (exon 1), and nucleotide positions 3336-5469 (exon 2). The intron is located between each of these exons in SEQ ID NO: 3, i.e., at nucleotide positions 157-3335 (intron 1).

| Human Wildtype GJB2 Gene Sequence (NCBI Reference Sequence: NG_008358.1) | |
|---|---|
| (SEQ ID NO: 3) | |
| 1 | ggggtgcggt taaaaggcgc cacggcggga gacaggtgtt gcggccccgc agcgcccgcg |
| 61 | cgctcctctc cccgactcgg agcccctcgg cggcgcccgg cccaggaccc gcctaggagc |
| 121 | gcaggagccc cagcgcagag accccaacgc cgagaccccc gccccggccc cgccgcgctt |
| 181 | cctcccgacg caggtgagcc cgccggcccc ggactgcccg gccaggaacc tggcgcgggg |
| 241 | agggaccgcg agacccagag cggttgcccg gccgcgtggg tctcggggaa ccggggggct |
| 301 | ggaccaacac acgtccttgg gccggggggc gggggccgcc ttctggagcg ggcgtttctg |
| 361 | cggccgagct ccggagctgg aatggggcgg ccggggaagt ggacgcgatg gcaccgcccg |
| 421 | gggtgcgagt ggggccgggc gcgcgcggga ggggaaaaag gcgcgggcga gccgccagcg |
| 481 | cgaggtttgt ggtgtcgccg atgtcccttc ggggtactct agcgcagccg cctggctact |
| 541 | tgacccactg ccaccaaacg ttttaaattc accgaaagct tagcttcgaa gcaaagctcc |
| 601 | gtttcgccgg tgaagcagga agccttcgct gcaggaactg acctttacct cttggagcgg |
| 661 | cttctgcaga aaaatccccg ggcagagatt tgggcggagt ttgcctagaa ctaacgcgga |
| 721 | gccagccgat cccggcctac cccggggcca agatttcagt ggcttccctt tttcctaaac |
| 781 | acttcacgag ggtctgtttc cgggctgtgc tccccgccta gaaggaaaat ttttaggacc |
| 841 | cttgttcgcg aagaggtggt gtgcggctga gacccgcgtc ctcaggacgg ttccatcagt |
| 901 | gcctcgatcc tgccccactg gaggaggaag gcagcccgaa cagcgctcac ctaactaaca |
| 961 | gctgctgaga gctgggttcc gtggccatgc acctgggact gccttgagaa gcgtggtacg |
| 1021 | gccgtgtccc catgtgacct tagagtccct ttcgaaactg ctgtgcacag tcggtcacaa |
| 1081 | tttcagacac tggtgagaag ggtggaggaa ccctctgggg acagccaggc aaggtcgacc |
| 1141 | acccatcacc taagggtgga gaaatttaag gggtgaagag tcccttttgc cttttctgga |
| 1201 | tcctggtgat tcacctagtg tcttccctaa ggaactgaac caactcctcc gctggcctct |
| 1261 | ggcagccctc caggcggtgc aggatggcgt gggcccggta ggaagctgca tgtaaccgcc |
| 1321 | cagggtcggg aggccaggag ggcagctcct cctctgactt gaatattgaa aacaacttcg |
| 1381 | tcctgcttct gagcccctct taacccatga ccccctagcc cattggggag taaatcttaa |
| 1441 | tttactcctc ttcctgaaaa aggatcttta aaacaggtag cttcaactca agctttataa |
| 1501 | aataacaata tagggtttct cggaactgta tttttctcag ctgatggtaa ctggacaggt |
| 1561 | ctgtagaagg gtgtatgacc tgggtttggc aggtggaaga gggcaaagga taaacccctc |
| 1621 | ctcctgcagc cccatattct tggccaggtg tattgttgta aaccaggaga gagtttactt |
| 1681 | cggggagtat cctgttttcc actcagtgag ggccaatgaa gaatgtctaa ttccataaga |
| 1741 | tgcttttgtt aaaatcggaa tgttgctgtc ctcggtggtt ctgctgttgg gacgggactg |
| 1801 | gcctgagctg tgggtgctgt agcaggacaa ccagctcacc taagggcctc ccagtctgga |
| 1861 | ttatcaatgg gtcagtgctg aacctgggct aaaatattgt tttttccaat gatgttgtct |
| 1921 | ttcccaagct cagtgaagct aaatgtttca caggcctatg tcaatctgat gtaactttcg |
| 1981 | tggccacctc tctcctgtta gcctctgacc aaggtggcac tggatggttt ctgcctgacc |
| 2041 | ttggtgcccc gtggcagcga ctgtgggtca tgaaagacat tcactacgag cctgcttctg |
| 2101 | gagtccatca gaaaacggga tgcaacttgc ctaaaatgag gagaggagga tgcttttaag |
| 2161 | aaaaagaaga aggaggattc actaccagct ctgaagggtg gaaaagagat gattcatccg |
| 2221 | gattgtggag agggtggaat cttgtttagg agagcgttgg ttgtggcagg cagggtgtaa |
| 2281 | ctatgaatca gtgaagacaa ttcacatcct gggatgaaaa gaaggccatg ggctcacagg |
| 2341 | agattatcca ctggcctctc cacatccgct tgcagtaagg agtgtgggac tctcccaagc |
| 2401 | ttcagcgctg aactgcaatg cagtgacgtc gcttagctgg gccagtaacc gagggagttg |
| 2461 | aattttctgt cattttaaaa taatgtgtct tttaagaaac actttgaaat taaaaccaca |
| 2521 | gcccacaatt ataatgcact gttgcagcac ttatcaaaac agatatgcta actgagccat |
| 2581 | cagtgccagc ctgacagtga ggccaccaag ccatccacaa agcctacacg aaagtctgtg |
| 2641 | ctcacagtgg cttttctcca tgaagagggc attcctaacc tcttcctttc acgtaggagg |
| 2701 | aagcaaggtc ctttgtaaaa ttttaactcg gggtgcctca aatgtaaact taaccactgg |
| 2761 | taacaacagt ttcactgcta catgccacgt ctgtgaaaat tcattcaaga cattaaggaa |
| 2821 | agtggctcag cagagagact agacatctta tcctcacggt tctcctgtac ttggcctctc |
| 2881 | agcctttgag caaggttggc ccaagctagt atcggcccca gtggtacagc caaaacttga |
| 2941 | gactgcaaat ggatgcagct gttgaacgct gagtaacttc tgcagagtca ggaagaccca |
| 3001 | aggaagctct gcagaggatg caggggtacg gtcagaaccc ctgagtgcct ttcagctaac |
| 3061 | gaggacttta tgacactccc cagcacagca aatttttatg atgtgtttaa agattgggtg |
| 3121 | aattactcag gtgaacaagc tactttttat cagagaacac ctaaaaacac gttcaagagg |
| 3181 | gtttgggaac tatacattta atcctatgac aaactaagtt ggttctgtct tcacctgttt |
| 3241 | tggtgaggtt gtgtaagagt tggtgtttgc tcaggaagag atttaagcat gcttgcttac |
| 3301 | ccagactcag agaagtctcc ctgttctgtc ctagctagtg attcctgtgt tgtgtgcatt |
| 3361 | cgtcttttcc agagcaaacc gcccagagta gaagatggat tggggcacgc tgcagacgat |
| 3421 | cctggggggt gtgaacaaac actccaccag cattggaaag atctggctca ccgtcctctt |
| 3481 | catttttcgc attatgatcc tcgttgtggc tgcaaaggag gtgtggggag atgagcaggc |
| 3541 | cgactttgtc tgcaacaccc tgcagccagg ctgcaagaac gtgtgctacg atcactactt |
| 3601 | ccccatctcc cacatccggc tatgggccct gcagctgatc ttcgtgtcca cgccagcgct |
| 3661 | cctagtggcc atgcacgtgg cctaccggag acatgagaag aagaggaagt tcatcaaggg |
| 3721 | ggagataaag agtgaattta aggacatcga ggagatcaaa acccagaagg tccgcatcga |
| 3781 | aggctccctg tggtggacct acacaagcag catcttcttc cgggtcatct tcgaagccgc |
| 3841 | cttcatgtac gtcttctatg tcatgtacga cggcttctcc atgcagcggc tggtgaagtg |
| 3901 | caacgcctgg ccttgtccca acactgtgga ctgctttgtg tcccggccca cggagaagac |
| 3961 | tgtcttcaca gtgttcatga ttgcagtgtc tggaatttgc atcctgctga atgtcactga |
| 4021 | attgtgttat ttgctaatta gatattgttc tgggaagtca aaaaagccag tttaacgcat |
| 4081 | tgcccagttg ttagattaag aaatagacag catgagaggg atgaggcaac ccgtgctcag |
| 4141 | ctgtcaaggc tcagtcgcta gcatttccca acacaaagat tctgacctta aatgcaacca |
| 4201 | tttgaaaccc ctgtaggcct caggtgaaac tccagatgcc acaatggagc tctgctcccc |
| 4261 | taaagcctca aaacaaaggc ctaattctat gcctgtctta attttctttc acttaagtta |
| 4321 | gttccactga gaccccaggc tgttaggggt tattggtgta aggtactttc atattttaaa |
| 4381 | cagaggatat cggcatttgt ttctttctct gaggacaaga gaaaaaagcc aggttccaca |
| 4441 | gaggacacag agaaggtttg ggtgtcctcc tggggttctt tttgccaact ttccccacgt |
| 4501 | taaaggtgaa cattggttct ttcatttgct ttggaagttt taatctctaa cagtggacaa |
| 4561 | agttaccagt gccttaaact ctgttacact ttttggaagt gaaaactttg tagtatgata |
| 4621 | ggttattttg atgtaaagat gttctggata ccattatatg ttccccctgt ttcagaggct |
| 4681 | cagattgtaa tatgtaaatg gtatgtcatt cgctactatg atttaatttg aaatatggtc |
| 4741 | ttttggttat gaatactttg cagcacagct gagaggctgt ctgttgtatt cattgtggtc |
| 4801 | atagcaccta acaacattgt agcctcaatc gagtgagaca gactagaagt tcctagtgat |
| 4861 | ggcttatgat agcaaatggc ctcatgtcaa atatttagat gtaattttgt gtaagaaata |
| 4921 | cagactggat gtaccaccaa ctactacctg taatgacagg cctgtccaac acatctccct |
| 4981 | tttccatgac tgtggtagcc agcatcggaa agaacgctga tttaaagagg tcgcttggga |
| 5041 | attttattga cacagtacca tttaatgggg aggacaaaat ggggcagggg agggagaagt |
| 5101 | ttctgtcgtt aaaaacagat ttggaaagac tggactctaa agtctgttga ttaaagatga |
| 5161 | gctttgtcta cttcaaaagt ttgtttgctt accccttcag cctccaattt tttaagtgaa |
| 5221 | aatatagcta ataacatgtg aaaagaatag aagctaaggt ttagataaat attgagcaga |
| 5281 | tctataggaa gattgaacct gaatattgcc attatgcttg acatggtttc caaaaaatgg |
| 5341 | tactccacat atttcagtga gggtaagtat tttcctgttg tcaagaatag cattgtaaaa |
| 5401 | gcattttgta ataataaaga atagctttaa tgatatgctt gtaactaaaa taattttgta |
| 5461 | atgtatcaaa tacatttaaa acattaaaat ataatctcta taataattta aaa |

### Solute Carrier Family 26 Member 4 (SLC26A4)

[0115] The SLC26A4 gene encodes the Pendred protein, and has homology to sulfate transporters. Mutations in SLC26A4 have been associated with hearing loss and deafness (Albert et al., Eur. J. Hum. Genet. 14:773-779, 2006; and Qing et al., Genet. Test Mol. Biomarkers 19(1):52-58, 2015).

[0116] The human SLC26A4 gene is located on chromosome 7q22. It contains 21 exons encompassing ˜57 kilobases (kb) (NCBI Accession No. NG_008489.1). The full-length wildtype SLC26A4 protein expressed from the human SLC26A4 gene is 780 amino acids in length.

[0117] Various mutations in the SLC26A4 gene have been associated with hearing loss. For example, point mutations V250A, D266N, E303Q, F345S, D697, K715N, and E737D have been reported in Chinese and U.S. patients with non-syndromic hearing loss (Dai et al., Physiol Genomics 38(3): 281-290, 2015).

[0118] Additional exemplary mutations in a SLC26A4 gene detected in subjects having non-syndromic sensorineural hearing loss or syndromic sensorineural hearing loss, and methods of sequencing a nucleic acid encoding SLC26A4 are described in, e.g., Albert et al., Eur. J. Hum. Genet. 14: 773-779, 2006; and Qing et al., Genet. Test Mol. Biomarkers 19(1):52-58, 2015. Methods of detecting mutations in a gene are well-known in the art. Non-limiting examples of such techniques include: real-time polymerase chain reaction (RT-PCR), PCR, sequencing, Southern blotting, and Northern blotting.

[0119] An exemplary human wildtype SLC26A4 protein is or includes the sequence of SEQ ID NO: 4. Non-limiting examples of nucleic acid encoding a wildtype SLC26A4 protein are or include SEQ ID NO: 5 or 6. As can be appreciated in the art, at least some or all of the codons in SEQ ID NO: 5 or 6 can be codon-optimized to allow for optimal expression in a non-human mammal.

[0120] In some embodiments of any of the compositions described herein, the SLC26A4 protein comprises a sequence that is at least 75% (e.g., at least 80%, at least 85%, at least 90%, at least 91%, at least 92%, at least 93%, at least 94%, at least 95%, at least 96%, at least 97%, at least 98%, at least 99%) identical to SEQ ID NO: 4.

Human Full-length Wildtype SLC26A4 Protein
(SEQ ID NO: 4)
MAAPGGRSEPPQLPEYSCSYMVSRPVYSELAFQQQHERRLQERKTLRESLAKCCSCSRKRAFGVLKTLVPI
LEWLPKYRVKEWLLSDVISGVSTGLVATLQGMAYALLAAVPVGYGLYSAFFPILTYFIFGTSRHISVGPFP
VVSLMVGSVVLSMAPDEHFLVSSSNGTVLNTTMIDTAARDTARVLIASALTLLVGIIQLIFGGLQIGFIVR
YLADPLVGGFTTAAAFQVLVSQLKIVLNVSTKNYNGVLSIIYTLVEIFQNIGDTNLADFTAGLLTIVVCMA
VKELNDRFRHKIPVPIPIEVIVTIIATAISYGANLEKNYNAGIVKSIPRGFLPPELPPVSLFSEMLAASFS
IAVVAYAIAVSVGKVYATKYDYTIDGNQEFIAFGISNIFSGFFSCFVATTALSRTAVQESTGGKTQVAGII
SAAIVMIAILALGKLLEPLQKSVLAAVVIANLKGMFMQLCDIPRLWRQNKIDAVIWVFTCIVSIILGLDLG
LLAGLIFGLLTVVLRVQFPSWNGLGSIPSTDIYKSTKNYKNIEEPQGVKILRFSSPIFYGNVDGFKKCIKS
TVGFDAIRVYNKRLKALRKIQKLIKSGQLRATKNGIISDAVSTNNAFEPDEDIEDLEELDIPTKEIEIQVD
WNSELPVKVNVPKVPIHSLVLDCGAISFLDVVGVRSLRVIVKEFQRIDVNVYFASLQDYVIEKLEQCGFFD
DNIRKDTFFLTVHDAILYLQNQVKSQEGQGSILETITLIQDCKDTLELIETELTEEELDVQDEAMRTLAS
Exemplary Human Wildtype SLC26A4 cDNA
(SEQ ID NO: 5)
atggcagcgccaggcggcaggtcggagccgccgcagctccccgagtacagctgcagctacatggtgtcgcg
gccggtctacagcgagctcgctttccagcaacagcacgagcggcgcctgcaggagcgcaagacgctgcggg
agagcctggccaagtgctgcagttgttcaagaaagagagcctttggtgtgctaaagactcttgtgcccatc
ttggagtggctccccaaataccgagtcaaggaatggctgcttagtgacgtcatttcgggagttagtactgg
gctagtggccacgctgcaagggatggcatatgccctactagctgcagttcctgtcggatatggtctctact
ctgcttttttccctatcctgacatactttatctttggaacatcaagacatatctcagttggaccttttcca
gtggtgagtttaatggtgggatctgttgttctgagcatggcccccgacgaacactttctcgtatccagcag
caatggaactgtattaaatactactatgatagacactgcagctagagatacagctagagtcctgattgcca
gtgccctgactctgctggttggaattatacagttgatatttggtggcttgcagattggattcatagtgagg
tacttggcagatcctttggttggtggcttcacaacagctgctgccttccaagtgctggtctcacagctaaa
gattgtcctcaatgtttcaaccaaaaactacaatggagttctctctattatctatacgctggttgagattt
ttcaaaatattggtgataccaatcttgctgatttcactgctggattgctcaccattgtcgtctgtatggca
gttaaggaattaaatgatcggtttagacacaaaatcccagtccctattcctatagaagtaattgtgacgat
aattgctactgccatttcatatggagccaacctggaaaaaaattacaatgctggcattgttaaatccatcc
caagggggtttttgcctcctgaacttccacctgtgagcttgttctcggagatgctggctgcatcattttcc
atcgctgtggtggcttatgctattgcagtgtcagtaggaaaagtatatgccaccaagtatgattacaccat
cgatgggaaccaggaattcattgcctttgggatcagcaacatcttctcaggattcttctcttgttttgtg
gccaccactgctctttcccgcacggccgtccaggagagcactggaggaaagacacaggttgctggcatcat
ctctgctgcgattgtgatgatcgccattcttgccctggggaagcttctggaacccttgcagaagtcggtct
tggcagctgttgtaattgccaacctgaaagggatgtttatgcagctgtgtgacattcctcgtctgtggaga
cagaataagattgatgctgttatctgggtgtttacgtgtatagtgtccatcattctggggctggatctcgg
tttactagctggccttatatttggactgttgactgtggtcctgagagttcagtttccttcttggaatggcc
ttggaagcatccctagcacagatatctacaaaagtaccaagaattacaaaaacattgaagaacctcaagga
gtgaagattcttagattttccagtcctattttctatggcaatgtcgatggttttaaaaaatgtatcaagtc
cacagttggatttgatgccattagagtatataataagaggctgaaagcgctgaggaaaatacagaaactaa
taaaaagtggacaattaagagcaacaaagaatggcatcataagtgatgctgtttcaacaaataatgctttt
gagcctgatgaggatattgaagatctggaggaacttgatatcccaaccaaggaaatagagattcaagtgga
ttggaactctgagcttccagtcaaagtgaacgttcccaaagtgccaatccatagccttgtgcttgactgt
ggagctatatctttcctggacgttgttggagtgagatcactgcgggtgattgtcaaagaattccaaagaat
tgatgtgaatgtgtattttgcatcacttcaagattatgtgatagaaaagctggagcaatgcgggttctttg
acgacaacattagaaaggacacattctttttgacggtccatgatgctatactctatctacagaaccaagtg
aaatctcaagagggtcaaggttccattttagaaacgatcactctcattcaggattgtaaagatacccttga
attaatagaaacagagctgacggaagaagaacttgatgtccaggatgaggctatgcgtacacttgcatcct
ga
Exemplary Human Wildtype SLC26A4 cDNA
(SEQ ID NO: 6)
ctcagccttcccggttcgggaaaggggaagaatgcaggaggggtaggatttctttcctgataggatcggtt
gggaaagaccgcagcctgtgtgtgtctttcccttcgaccaaggtgtctgttgctccgtaaataaaacgtcc
cactgccttctgagagcgctataaaggcagcggaagggtagtccgcggggcattccgggcggggcgcgagc
agagacaggtcatggcagcgccaggcggcaggtcggagccgccgcagctccccgagtacagctgcagctac
atggtgtcgcggccggtctacagcgagctcgctttccagcaacagcacgagcggcgcctgcaggagcgcaa
gacgctgcgggagagcctggccaagtgctgcagttgttcaagaaagagagcctttggtgtgctaaagactc
ttgtgcccatcttggagtggctccccaaataccgagtcaaggaatggctgcttagtgacgtcatttcggga
gttagtactgggctagtggccacgctgcaagggatggcatatgccctactagctgcagttcctgtcggata
tggtctctactctgcttttttccctatcctgacatactttatctttggaacatcaagacatatctcagttg
gaccttttccagtggtgagtttaatggtgggatctgttgttctgagcatggcccccgacgaacactttctc
gtatccagcagcaatggaactgtattaaatactactatgatagacactgcagctagagatacagctagagt
cctgattgccagtgccctgactctgctggttggaattatacagttgatatttggtggcttgcagattggat
tcatagtgaggtacttggcagatcctttggttggtggcttcacaacagctgctgccttccaagtgctggtc
tcacagctaaagattgtcctcaatgtttcaaccaaaaactacaatggagttctctctattatctatacgct
ggttgagatttttcaaaatattggtgataccaatcttgctgatttcactgctggattgctcaccattgtcg
tctgtatggcagttaaggaattaaatgatcggtttagacacaaaatcccagtccctattcctatagaagta
attgtgacgataattgctactgccatttcatatggagccaacctggaaaaaaattacaatgctggcattgt
taaatccatcccaagggggtttttgcctcctgaacttccacctgtgagcttgttctcggagatgctggctg
catcattttccatcgctgtggtggcttatgctattgcagtgtcagtaggaaaagtatatgccaccaagtat
gattacaccatcgatgggaaccaggaattcattgcctttgggatcagcaacatcttctcaggattcttctc
ttgttttgtggccaccactgctctttcccgcacggccgtccaggagagcactggaggaaagacacaggttg
ctggcatcatctctgctgcgattgtgatgatcgccattcttgccctggggaagcttctggaacccttgcag
aagtcggtcttggcagctgttgtaattgccaacctgaaagggatgtttatgcagctgtgtgacattcctcg
tctgtggagacagaataagattgatgctgttatctgggtgtttacgtgtatagtgtccatcattctggggc
tggatctcggtttactagctggccttatatttggactgttgactgtggtcctgagagttcagtttccttct
tggaatggccttggaagcatccctagcacagatatctacaaaagtaccaagaattacaaaaacattgaaga
acctcaaggagtgaagattcttagattttccagtcctattttctatggcaatgtcgatggttttaaaaaat
gtatcaagtccacagttggatttgatgccattagagtatataataagaggctgaaagcgctgaggaaaata
cagaaactaataaaaagtggacaattaagagcaacaaagaatggcatcataagtgatgctgtttcaacaaa
taatgcttttgagcctgatgaggatattgaagatctggaggaacttgatatcccaaccaaggaaatagaga
ttcaagtggattggaactctgagcttccagtcaaagtgaacgttcccaaagtgccaatccatagccttgtg
cttgactgtggagctatatctttcctggacgttgttggagtgagatcactgcgggtgattgtcaaagaatt
ccaaagaattgatgtgaatgtgtattttgcatcacttcaagattatgtgatagaaaagctggagcaatgcg
ggttctttgacgacaacattagaaaggacacattctttttgacggtccatgatgctatactctatctacag
aaccaagtgaaatctcaagagggtcaaggttccattttagaaacgatcactctcattcaggattgtaaaga
tacccttgaattaatagaaacagagctgacggaagaagaacttgatgtccaggatgaggctatgcgtacac
ttgcatcctgaaagtgggttcgggaggtctctatgagcaaggaatacaagacaaaacttcctcaatgcatt
gactatttcttcagactcaaaacactcattcttttttctattaagccattgaaagagaagcactaagactg
cttctaggctttatttataaaataaacaccttatccctaacatgggcaaaatggctagaattattcagacg
atttggcagcgtccagggtaagctggtgttataatacgctgctgatctacatcacagatttgctaataatg
ttcacgtgggccctggcatatctctgttcagttagagtgagtgctgacccaacagcctctgtggtcaagcg
agtcacgaatgattaatcataaagaaaaatcagtttttgactgacctggatatccatgagctgcactgatc
accatgtaaggtcacatttagtaaatgctgaaataaaatgattaatgcatttatcaataaaagcctttgaa
aatactttggataataaattggagttttaaaaatgcaaatttgcttagtatctaataatgaagtgttatta
catatagccggaattgaggatctctttgatcctggaaatggtttacctaaaagctacagaaccaggccaat
atattttgaaatattgatgcagacaaatgaaataataaagagattttcatggtttataaaaatcttttttg
atatgataataatcatgatcacaactgagatcaaaaaaatatatgacagattattttgtttaaaaatgcag
ttttaattatcttagtctatagaaatgatcattgcatggaggcatgtataggtatgatctgtgtaaaatct
gacataaaaacagtgctattctgagtgaaaatttttttgatgtgcttacataaccatggtgattaaaatga
gtttatattttttctcaaaaattttagcagtgtgtaaagtaagtaatctttaactgaactctgaccactta
aaaaaaaatctaaaaattgaactacctatagtagtctgtgtttaaagtgaatttttaaagacaaagcattc
taaatgaactcaatataaaaacattcatttggaatgtacatactgaaaaatacaggtttttttgaccaaaa
gtttttatatcttttctttttatttatttttttcctaagtgccaacaattttctagatattatatacaaca
caggctttgatcttggggacttttcccatatatttcacactggagtgaatgaagttgtacttcatttctag
agaaaagttatacccaggtccccaattgagaatgtcttgcttgattgaaaacgacatcatcccttggtata
ctccagggattggtttcaggacccctgcatttaccaaaatttgtgcacactcaagtcctgcagtcacccct
gcctaaagatagaatggcttctctgtttttcttctgaaatacaaccagaaacaatgtgtctatttctgaaa
gaataggattaatgatcatacaaatgggttaatcctgaattctggttgtaaatctggttacagcataacta
ggattataatgctgcctcattttcacagcactacttgcttatattgacaacaaatcatctcgctaaagagt
gaatgtaggccaggcgcggtggctcatgcctgtaatcccagcactttgggaggccgaggcgggtggatcac
gaggtcaggagatcgagaccatcctggctaacatggtaaaaccccgtctctactaaaaatagaaaaaaaga
aattagcctagcgtggtggctggcgggcgcctgtagtcccagctatttgggaggctaaggcaggagaatgg
cgtgaacccgggaggcggagcttgcagtgagccgaggtcgtgccactgcactccagcctgggcgacagagc
aagactccgtctcaaaaaaaaaaaaaaaaaaaaaaaaagagtgaatgtaatagtcttgcagaaaatgaatg
aatacctttgttcaataaaggaaatatgcactgctcacttttttgaaggaaatgccaaagttacgttttac
aacaaggctagagtttgtaaattctgggttcatttgtgatgacataagtcagcaaactgcgggaatactgt
ctcttctatgtattttgtgaatagtaagcataattttagttttgtattatcaatgaaaatttcacttgaaa
ttaaagctgccttttgttatatttttaacctataggataagattccagtattgtatatgagttttaacaaa
ttaaaaaatcaaatcatgtacatttgaaaatatttgcacacatttaaaaataaatgtaaagttgtctttta
aactactcggatgtgtcctttctgaacaa

[0121] A non-limiting example of a human wildtype SLC26A4 genomic is SEQ ID NO: 7. The exons in SEQ ID NO: 7 are: nucleotide positions 1-221 (exon 1), nucleotide positions 1005-1171 (exon 2), nucleotide positions 2262-2801 (exon 3), nucleotide positions 11504-11614 (exon 4), nucleotide positions 13530-13714 (exon 5), nucleotide positions 14311-14475 (exon 6), nucleotide positions 22568-22720 (exon 7), nucleotide positions 22821-22903 (exon 8), nucleotide positions 28419-28566 (exon 9), nucleotide positions 29490-29603 (exon 10), nucleotide positions 33769-33846 (exon 11), nucleotide positions 33987-34082 (exon 12), nucleotide positions 35299-35405 (exon 13), nucleotide positions 37408-37477 (exon 14), nucleotide positions 39449-39541 (exon 15), nucleotide positions 40467-40562 (exon 16), nucleotide positions 41193-41423 (exon 17), nucleotide positions 43697-43751 (exon 18), nucleotide positions 49420-49565 (exon 19), nucleotide positions 51905-51988 (exon 20) and nucleotide positions 56348-57175 (exon 21). The introns are located between each of these exons in SEQ ID NO: 7, i.e., at nucleotide positions 222-1004 (intron 1), nucleotide positions 1172-2261 (intron 2), nucleotide positions 2802-11503 (intron 3), nucleotide positions 11615-13529 (intron 4), nucleotide positions 13715-14310 (intron 5), nucleotide positions 14476-22567 (intron 6), nucleotide positions 22721-22820 (intron 7), nucleotide positions 22904-28418 (intron 8), nucleotide positions 28567-29489 (intron 9), nucleotide positions 29604-33768 (intron 10), nucleotide positions 33847-33986 (intron 11), nucleotide positions 34083-35298 (intron 12), nucleotide positions 35406-37407 (intron 13), nucleotide positions 37478-39448 (intron 14), nucleotide positions 39542-40466 (intron 15), nucleotide positions 40563-41192 (intron 16), nucleotide positions 41424-43696 (intron 17), nucleotide positions 43752-49419 (intron 18), nucleotide positions 49566-51904 (intron 19), and nucleotide positions 51989-56347 (intron 20).

| Human Wildtype SLC26A4 Gene Sequence (NCBI Reference Sequence: NG_008489.1) | |
|---|---|
| (SEQ ID NO: 7) | |
| 1 | ctcagccttc ccggttcggg aaaggggaag aatgcaggag gggtaggatt tctttcctga |
| 61 | taggatcggt tgggaaagac cgcagcctgt gtgtgtcttt cccttcgacc aaggtgtctg |
| 121 | ttgctccgta aataaaacgt cccactgcct tctgagagcg ctataaaggc agcggaaggg |
| 181 | tagtccgcgg ggcattccgg gcggggcgcg agcagagaca ggtgagttcg ccctgaagat |
| 241 | gcccacaccg cccggcccgg gctccactcc cggggaggcc tcgagggttg cggatgggac |
| 301 | tcttaagtgg tcacggatca ggtgggcagg gggcagtaca gctttctttc tgagacgccg |
| 361 | agagcgaaca ggctgctcgg aaaacaggac gaggggagag acttgctcaa taagctgaaa |
| 421 | gttctgcccc cgagagggct gcgacagctg ctggaatgtg cctgcagcgt ccgcctcttg |
| 481 | gggacccgcg gagcgcgccc tgacggttcc acgcctggcc cgggggtctg cacctctcct |
| 541 | ccagtgcgca cctggagctg cgtcccgggt caggtgcggg gagggaggga atctcagtgt |
| 601 | ccccttccag ccttgcaagc gcctttggcc cctgccccag cccctcggtt tgggggagat |
| 661 | ttcagaacgc ggacagcgcc ctggctgcgg gccatagggg actgggtgga actcgggaag |
| 721 | cccccagagc aggggcttac tcgcttcaag tttggggaac cccgggcagc gggtgcaggc |
| 781 | cacgagaccc gaaggttctc aggtgccccc ctgcaggctg gccgtgcgcg ccgtggggcg |
| 841 | cttgtcgcga gcgccgaggg ctgcaggacg cggaccagac tcgcggtgca ggggggcctg |
| 901 | gctgcagcta acaggtgatc ccgttctttc tgttcctcgc tcttcccctc cgatcgtcct |
| 961 | cgcttaccgc gtgtcctccc tcctcgctgt cctctggctc gcaggtcatg gcagcgccag |
| 1021 | gcggcaggtc ggagccgccg cagctccccg agtacagctg cagctacatg gtgtcgcggc |
| 1081 | cggtctacag cgagctcgct ttccagcaac agcacgagcg gcgcctgcag gagcgcaaga |
| 1141 | cgctgcggga gagcctggcc aagtgctgca ggtagcggcc gcgcgggcct gcgtagagag |
| 1201 | aagcggagcg gggcgtccac gccttgggga gggaagggcg tccccagcgg gcgagagtgg |
| 1261 | ggtgcgggcg gcggagcccc tgggcgccag ctgcttctcc cagaggcccg actttcggtc |
| 1321 | tccggtcctc cacgccgccc ttctggtggg agggtggctc catcagtctc gggcccgaaa |
| 1381 | tgaacttacc tgggaaactc gcctttgggg agagtgggtt ctaggagccc cgtctctctt |
| 1441 | tttcctctct gaaggaaact tggagtgcct cttggggtac agtgggtccc tgttgccttc |
| 1501 | ttgggagctt gtttaaatga aatgaatagg gaaacccagc tcttgaccag gaggagtcct |
| 1561 | tgaaacactc aagctaagta ggcgggctac cattcagtta gagaccagga tgcaagctag |
| 1621 | aacccagggg agcgcggggt gtgccaagta cttcatcagc aggctgtggg acccctgggg |
| 1681 | aaagccaccc tcagtctcta aacccaaaca tgccgtaact agatgtcaca aacataaaga |
| 1741 | aattagagtt tctaaaacct ttcattatag aacatttcaa atatatgcat aagtagacgt |
| 1801 | agtagtataa tgaactcccc acccccaccg tttttaaccc atcactcggc ctcaactgtg |
| 1861 | atcaaatcca agttactctt gtttcttgta tctacaccta cttgctccct ccagtattat |
| 1921 | ttttaagcaa atctcatata gcatactgtc tttatgtatt ttactgcata tctttaaaga |
| 1981 | ctcttaaaaa atataaccac atttcatgat cacaccttaa tatctaaaaa taacctccta |
| 2041 | atatcaaaaa ttgagtcatt attaaaatgt ccaatcgtcc cataaatgcc ttaattaaaa |
| 2101 | aacaatttat tcaaatcagg agttatacca cctacttttg atatttttct ttcatctgta |
| 2161 | ggtcactgaa tttaaaaact accaagtagc aaggtataag gtatacattc ctcatgctaa |
| 2221 | gatttttgta aaaactagct ccaggcttgt attgccaaaa tatactcagt gtgtttatct |
| 2281 | tctttaaaga aaataataat aataaggcgc ctggattagg agtctgaaaa gtaatctcca |
| 2341 | tttagagact ccacatccat cagtctctgg ctggaccaga aaataggttt ttgtgtagga |
| 2401 | atattttttc agaggattaa aaatgtgagc gaggggtggg acacttaatc ctgtgttctc |
| 2461 | tagaagagtg catttaaaag gatagataca gttcttggca aaagcatggt aagcacttca |
| 2521 | gggttattat tttccaggaa atacttatcc tttttccaaa tagttataaa catcagcaga |
| 2581 | atccagttca taactttgtg atttgcaaat tggttgtgac tgagattgga ttgaaaaccc |
| 2641 | agttttcttg ctttttgaca gttgttcaag aaagagagcc tttggtgtgc taaagactct |
| 2701 | tgtgcccatc ttggagtggc tccccaaata ccgagtcaag gaatggctgc ttagtgacgt |
| 2761 | catttcggga gttagtactg ggctagtggc cacgctgcaa ggtaagatgt tggcagattg |
| 2821 | agagttctgg tctccagcag gagtttaaca cttctcccca gctaccatag gtctgtgaca |
| 2881 | gatggttgct tacccttcaa ggcctgtatc tttcctgtag agccccttag tggagagagt |
| 2941 | cacctctctt ctccccttcc ttagagttct cttcctggga aactgctgcc ccactaggtg |
| 3001 | cagaggtcca atttagaggc atatactagg cagtggcttc tcaatttttt taaattttat |
| 3061 | tttatttgag acgggggctc gctctgtcac ctaggctgga gtgcagtggc gcaatcctgg |
| 3121 | ctcactgcaa gctccgtctc ccgggttcac gccattctcc cgcctcagcc tccccagtag |
| 3181 | ctgggactac aggcgcccgc cactacgccc ggctaatttt ttgtattttt agtagagacg |
| 3241 | gggtttcacc gggttagcca ggatggtatc gacctcctga cctcgtgatc cgcctgcctt |
| 3301 | ggcctcccaa aatgctggga ttacaggcgt gagccactgc acccagccag cttctctatt |
| 3361 | ttcattgacc acaattcaat aagaaatgtg taaagagttt caagtcaaga tttaaaaaaa |
| 3421 | aaaaagaaat gtgttacatc ctgatatata catatatatc taaagttcct gtgaaatatt |
| 3481 | tattataaca atgtgctaat ctttcacttt gttctattat gcttaggttt tttaaatgat |
| 3541 | gattgcagca cattaaatta ttttatatcc acacgtggat cttttttgtt ggtttgtttt |
| 3601 | gctttgcttt ttagagatac agtcttgctc tgtcacccag gctggtgtgc agtggcacga |
| 3661 | tcttggctca atgcaacctc tctgcctctc gggttcaagt gattcttgtg cctcagcctt |
| 3721 | ctgagtagct ggggctacag gcatgtgcca ccatgtccag ctaattactg tatttttagt |
| 3781 | agagatgggg tttcgccatg ttggccaggg tggtctggaa ctcctaacct caagtgatcc |
| 3841 | gccctccttg gtatcccaaa gtactgtgat tacaggcatg agccaccatg cccagcctcc |
| 3901 | cacacgtgga tcttgaggtg tagtttgaaa ctggcttaag gaaaagtgaa gggagcttcc |
| 3961 | tagcctggac tccacatgaa tgttttgcct gcccctcatc cctttttaaa aaaattcatc |
| 4021 | ctcttatttt aatgtgtggg aaaatgtgcc aacataggtg gttatttgtt cttttataaa |
| 4081 | ctgagttcat accataatat tcccataagc atcttagaaa tctgttgtat agttggtgcc |
| 4141 | tagcagcatg gcattctcct ctgtccccta tccccaccat ctcgtttctg ccccaccccc |
| 4201 | aacaccctga ccaatttccc aaagaccctg aatcatgaaa acagaaatat cgttatttat |
| 4261 | tataatttgt gaaacaccta atatgttcca ggcactaggt atgctgacac gaataagatg |
| 4321 | catcctctgc ttccaaggaa ctcatagtcc aatggagaaa gagaaaacaa ttcaatgtga |
| 4381 | taagggctgt ggcaggggag tgcaaattac ttgctaaggg agtgcaaatg aggttcactc |
| 4441 | aaagcggtct taggggatct tgaatagctt cctggaagtt gaatgtcaaa gctgagtttc |
| 4501 | cctgatggct aagtctgagt ttgccaagtg atgggaagta gggtggggtg gggatggctt |
| 4561 | gaaaatagac tatttcagaa gctagtaatg aatgttgagc aatattgtga gctaaaattt |
| 4621 | ggctatggag ctttcaagat tgctcagatc aggccaggta gatgcccgaa gagaaggagg |
| 4681 | atggcctatg aacccagggt ggagcctcag cctgatcaag catgttctta atcacaaagg |
| 4741 | tggacgggag agagactagg atgggcbgtg tggttcctaa gttaaacaat gccaagtatt |
| 4801 | ctacactgtg ctctaagggc tgtgacatgg tgacaccctg tgactcctgg gggacaggaa |
| 4861 | ccatgcctca ttcatgtttg ttcagcaggt gcctagcaca gagacaggca cataatagat |
| 4921 | ggtatattta gtgaaaaaga ttgaattgca ttcctgataa tgaatcttct ttatatataa |
| 4981 | aaaatggtgg ttcatgctcc atgtctcccc agttttcata gacaagtatc ttataagaat |
| 5041 | tcattttgtt tataagcatg agacactatg ctaagtaaga atgttgccag ctatctcatt |
| 5101 | taatcctcat aacaatcctg ctaggtaggt ctattattat ttcattttca gtaggtgaaa |
| 5161 | aaatctatta aatcttgccc agggtcacgt ggctggtaag tggtacagct gggattttaa |
| 5221 | tccggtgtct attgtgtagt tccttacttt atgggtaaga tgcttttcta gaaacattat |
| 5281 | ctctataaag ttttctgtgt aaggtgaatt tctgggaggt taatctggct cagttacaca |
| 5341 | tccatttatc attcattcac ttaataaata tttataaact aattctgtag accaggtatc |
| 5401 | cagccatgtg cactcagtgg ttcattaaca ggcacaggtg ctgacttcat ggagctttgt |
| 5461 | aaaattattt tgaggggtag ggatgggaat taaataagta gataaataga aaaataatta |
| 5521 | tagattgcaa tatctattgt ggtggattaa atatactgca atagggatta atttgaaagg |
| 5581 | tggatcttta tttttatatt tttttgagac agggtcttgc tctgttgcgc aggctggagt |
| 5641 | gcagtggtga gatcacagct caccacagcc ttggcctcct gggcccaggt gatcctccca |
| 5701 | tctcagcctc gccagtagct ggaactacag gcatgtgcca ccatgcttgg ctaatttttg |
| 5761 | tattttttgt agagacaagg tttcaccatg ttgcccaggc tggtctggaa ctcctaggct |
| 5821 | caagttatct gcctgcctcg gcctcccaaa gtgctgggat tagaggtgtg agccattgtg |
| 5881 | cccagccagg aagggaggtc tattttagat ataatggtca aggaagaact tactgagaag |
| 5941 | gtgaaattta gtaaaagaca agagaatgag aaggagacag ccatgtgata agcagaaaaa |
| 6001 | aagagtgtac caggtaaagg tgcaaaggcc ctgaggccag aaaacttagc attttccagg |
| 6061 | gaggaagagg aagaattgta gtgtggatga gtgcagtggg ggagggtgag taaaccatga |
| 6121 | aataaactga ggcaggactg ggattaggat gaggtaaggg aggcactcac tctcaggatg |
| 6181 | cctctttaaa tattgtaccc taggaaactc atttgcctca ccctattcct ggccctgtgg |
| 6241 | ggatattgct gtgaattaaa gggagaatgg gtgtgtcagc ttgaaccaga tgatgcaggc |
| 6301 | tatgaagaga gctgcaagat aggaatatat tgtgcagcaa gaatcactga cacataatga |
| 6361 | tgagtgtgga tgaaaatcac tgatgcctcc aaggttgttg gcttgagcaa ccggatagat |
| 6421 | cattacatca tttatctaaa tggcaaagac aggctgagga gcaggtttgg gataggaaat |
| 6481 | caagtttcct tttggatatg ctaagtttga gacacagggt gagacatcta agtggagatg |
| 6541 | ccacctagag aagtgggagc tactgcaagt gtgaaggtta gaggagaggt ctaggctaga |
| 6601 | cataaaaatc aggaaagcat tgctgaagag gtgatattta caagagtggg aatgcctgtg |
| 6661 | attacctagg aagaaagggc aggtgtagaa gaaaagagag ccagagtact tagaagttag |
| 6721 | gaaggcaagg agaggggcag ccaagaacct gagaaagcct ggcgcaggaa gttgaagaca |
| 6781 | aagaacaacc aaaggaatgt gggatcagaa gccaagagag aaggtttaaa aaaaaaaaaa |
| 6841 | aaaaaaaaaa agcatagagg ggctgagagt gttgaatttg cctgaggggt ggggtatgat |
| 6901 | gaaggattac agactgcttt taagaagttt tgccatgaat cagagggaga taagagatga |
| 6961 | agacagagtg aagggagaat ttgtttttct taatatggga gatactagaa cgtatttgtg |
| 7021 | aaccgatagg aatgacctag tagaaagaaa gagatctgtg gtgcaagaag tacaagagaa |
| 7081 | ataactagaa gcaaagtagt aaaaaggggc aaacgtggag gggtttgaga atggaactag |
| 7141 | gagaactact ccttaaaggc aggagggata tttcttccat tttcaaagga agatagccca |
| 7201 | aatggtgcag atgcagacgg gtttgaaatt ttgatgaaaa gtaacttggg agcatctcat |
| 7261 | gcattctgtg ttttcgatta aatgcagaat atgtccctta actttgagtc tggtggagaa |
| 7321 | gggtttgggc agattgaggt aagtagggga ggtttgaata gttgtctcaa ggagaggaaa |
| 7381 | ggcacacccc ctgaggaaat gtaactgggt ccccaggcag tgttgagtgc ccatctagca |
| 7441 | cttgtggtca cacattttac atgaaattgg ttagcccaga tgtagatgcc ttcagtccag |
| 7501 | tttatctagc tgctcaaagg ctctcatgga taaggtagat gtttgaggtc agccaaattg |
| 7561 | gggttttgcc agacaagaaa aggaaggaaa gagagagtga aaaaagggag ttaagaatat |
| 7621 | ttgcaaaatt ccatggaatc tgtgtgggca agggtggaag tgaagacagg aaggtgtgga |
| 7681 | ggatagagag aaagtggatc ggttaattaa ttagaagcct cgtgagcaca aataaatgtt |
| 7741 | gcaataagga ttctgcagta gatgagctgg aaggtttgga ggctgtagct ggagagaggc |
| 7801 | tcaaaattca gattttggag gtggtggtgt ggtttccagt gatgacaatg tccatgccac |
| 7861 | aaccactggc tgagcagctg agtagtagaa caactccgag aagaccagct caggttactg |
| 7921 | ggaagccagg aagttgctaa ggatgatggg atctttgtga tttttgttat taaaacaaat |
| 7981 | tcccatcaga cagcaaaaga tcgatgcaac ccttgtagtg ctatttttat tcacaacttt |
| 8041 | aaggagtctg ctgtctgctt tctccttttg acttttatgt atttgtttgt ttaaacaaca |
| 8101 | gaaatttatt tctgcaacat gaaggtgcct gtagattcag tttctggtga cagcccgtca |
| 8161 | ccttgctgcg tcctcacatg gtggaaggct ttacctttag aagaaattta aatttaatat |
| 8221 | aaatttcaac tgtttattag cacctgcttt gccagtattt gtcaccatgc tataaatcat |
| 8281 | gactaccaac agagaaattc tatcatttaa atcaatggct cagatttctt ctaatttttt |
| 8341 | ttcttttttg agactctttc tcacacaggc tggagtgtag tggtatgacc ttggctcact |
| 8401 | gcaaccactg cctcctgggt tcaaactatc cttgtgcctc agcctcctca gtagctgaaa |
| 8461 | ttacaggcat gtaccaacac ccccagctaa tttgtgtatt tttagtagag acgagatttc |
| 8521 | accatgttgg ccgggctggt cttgaactcc tggcctcagt gatcttccca cctcagcctc |
| 8581 | ccgaaatgct aggattacaa tcatgagcca tcacacctag ccccagattt ctttacaaat |
| 8641 | tgtgtaattt taaaactgtt gtaccaagtt tctttataat aaagatgatt ccagtatatt |
| 8701 | tgagtagtag tggtccctaa atgggacact ctgtatgaaa actgaaaagt tccccttttc |
| 8761 | caggcatatt aagaactgca gagcccagtt tggggaaatg gaagtttgag aaggacttga |
| 8821 | aaaatgtcca tatgaaatag acaagttgtg ctttcatccc ctgctccttc ttttcttatc |
| 8881 | ttccttctgt ggagtcacct tcctatttta ttccatgctg ttgggactac tgactattgc |
| 8941 | aattcctgtt tgtaatttac atattaaaac aattgtacta atagatatat ttttctagaa |
| 9001 | tacaaactcc actagggcag agactttgtt ttaacagtgc ctgacacatg gtaggtgcat |
| 9061 | aatcaactgt tgttgaatga atgaatgctt attgtagaaa actagaaaat acatataagg |
| 9121 | aacatgaaaa aatacctcca ctacaaacta gaagtctcct ctgatcctac catacagata |
| 9181 | acccattgat atttcagtaa atatcttact aggcacataa atacttatct atataaaagt |
| 9241 | ataatgaaat gtctggaaat aataagcacc aaattcagga taattgttgc cttctgaggg |
| 9301 | tagagggagg aaagaggatg tgattgagga agagtatact gagagtttcc gctgcattgg |
| 9361 | cagtaattta tttcttaagc tagatgatgg atacatgaaa gtttattata ttattcattg |
| 9421 | tgtattgtgt ttcttgtata tgtaaattac ttcatatttt attcaaaata cctccagatt |
| 9481 | tttttttttt tttgagatgg agtcttgctc tgttgcccag gctggaatgc agtggcgcaa |
| 9541 | tctcggctca ctgaaacctc cgcctcctgg gttcaagcag ttctctgcct cagcctcctg |
| 9601 | agtagcbggg attacaggtg cctaccccca tgcctggcta atttttgtat ttttagtaga |
| 9661 | gacggggttt caccatcttg gccagggtgg tcttgagctc ctgacctcct gatccaccca |
| 9721 | cttcggcctc ccaaagtgct gggattacag gtgtgactca ccgcgcccgg tccctccggc |
| 9781 | tttttttaat gcgtacactc ccacaggctg gagtgggagt gtatttttta caaaagagga |
| 9841 | agcatacata cctatcagtt ttgaatcttg attttactca cttttttccc tcttacttca |
| 9901 | catctctcca cgttactgaa tgtacttctg agcatcacat caatttcatt tcatagaatt |
| 9961 | acgaagtatg aagcataact tagttaacca cttccctgct tggggacatt catctgataa |
| 10021 | gtaatattga gtgtgtgggg gccagcatat tcaggcbgtt gccattttta ataaactact |
| 10081 | ataaatgtaa ttccttatta atgactcaag agtgaaaagg cttgattttc tctcattgtg |
| 10141 | agtgagtgaa gggtgaggag gtaaaacgga gtaagatatg ctggctacct aagtatttaa |
| 10201 | ccaaggaaaa gaatgtcatt atcctcttct aaccctcatg taaactagaa tgttgatttc |
| 10261 | tctatagcca ggcattaatg ggtctggggg ctgctgccat tgcctagtgg aggagttggt |
| 10321 | caacttcatc agggtagagt tgtcttgtct gctgctgagt ataattatca tattttttct |
| 10381 | ttgggtctaa cttttcttcc ccaccaaaaa aggagaaagg gcagtgtaac aatgactgtg |
| 10441 | tccctcagaa cgcagagaaa tattgagctc agacacaact gcctctgtgc aaaactggtc |
| 10501 | tgagcctttg gagtgaattg accaaaactt ttttttttct tttttagaca taaggtcttg |
| 10561 | ctctgttgcc caggctggag tgcagtggca cgatcatagc ttgctgtaac ctcaaactcc |
| 10621 | tgggctcaaa caatcctcct gcctcagcct ccttaataac taggactaca ggcgtgaacc |
| 10681 | aatatgctgg gctcattcat tttattgtag agatggagtc ttgctatgtt ttccaggctg |
| 10741 | gtctcaaact cctgggctca actgatactc ctgcctatgg cttcccaaag cactgggatt |
| 10801 | ataggtgtag gacaccaggc ctgaccaagt ttttaatcaa catttgactt gattgttttt |
| 10861 | tcccactgat ctgattggtg gaagactgaa ttactgatca actgagtcca ttcatttgag |
| 10921 | caggtgatgt ttgtagatgc aatcattgtt ccaggtgatt tggatcctgt tctgcatcct |
| 10981 | agcatagcca gtctgtatgc aagataagga gaccaactca ggacaggctg atctgttgaa |
| 11041 | actgtaaatt gagagtatct gtgtaaaggc ccttctttct gcagtagaaa gacagatgct |
| 11101 | cctctacttc tcatgagtta catcctaata acccattgca agttgaacat attttaagtc |
| 11161 | aaaaatgcac ttaatacacc taacctatgg aacatcatcg cttaggctat cctacctgaa |
| 11221 | atgtgctcag aacacttaca ataacctaca gttgggcaaa ataatctaac gcaagcctat |
| 11281 | tttataataa agtattgaat atctcatgta gtttactgaa taatgtactg aaagtgaaaa |
| 11341 | acagaatggt tgtatggtta cttaaagtat ggtttctact gaatgcatat tgcttttgca |
| 11401 | tcatcataaa ggcaaagtca taagtggaac cattgtaagt tgaggacttt ctgcatactg |
| 11461 | taactttggt ttgtgaatgt aatcactttg catgtgcttt cagggatggc atatgcccta |
| 11521 | ctagctgcag ttcctgtcgg atatggtctc tactctgctt ttttccctat cctgacatac |
| 11581 | tttatctttg gaacatcaag acatatctca gttggtaatt ataagtatat tttacaatta |
| 11641 | tatttgctca tgtttaaagt gttttggcta tattaagtgc attatacctc tattaggttg |
| 11701 | gtgcaaaagt aattgcggtt ttcacaatta tacttttaat tgtgaaaacc gcaattactt |
| 11761 | ttgcaccaac ctaatatatc tgtgttaatg ttgtcaggga aatgggattt cagtgttttg |
| 11821 | cctgcttttt ctattcactg atgttaggta acttttttaa tgaagtggaa aaataaaaaa |
| 11881 | actgaaaatg acagcctact ttaacatttt agcatgtttt gctttttaaa aacgtgatca |
| 11941 | atttgactcc atttttggag tcataatgac agggaaaaaa tgacacaagg tctttgaacc |
| 12001 | taccatttta ctggattaac ttagaaatta ctaagtatgt tcatcaaata catgttcatg |
| 12061 | atttaattaa agagcatact tattttaaat cactaatatt agaagactgg caaaatctta |
| 12121 | ccaaaacaat ttagaagcta agcttggctt tctttcttgg tatggcttat aataagtttt |
| 12181 | cctgctattc ctaaaatttg aattctcgtt tgttagaatg tcctagtaaa tgagtgtttt |
| 12241 | aatgctattt tgtgactttg acatttatac tagagaaaat tttgctccta catccatctg |
| 12301 | ctggctagac atgtctacct cgatgatcct cttgaaataa atgcaaccat ctactttatc |
| 12361 | cccaacccat gtttttgtcc ttagttgtat ttccttagaa ggagatcaga aagaggtttt |
| 12421 | gattgaaaga acttccacac cttggagaat caatcagtgt tgagtgcttg actagatgag |
| 12481 | gaacatggaa gcbggttttt ctctttggta ttctatacat tgagatattc caggtgactg |
| 12541 | gggttgggtt ttgagacctc aaaaccataa agccttccat gatgagaggg tagaatcatc |
| 12601 | atcatcgtca tggataaaaa taacagtagt gaacggagca attgctgaaa aaaaaatatt |
| 12661 | ttttaaaata taaaatctta cagattgaca tttgatatga aaaaatgttt tgtcttacaa |
| 12721 | aaagagaaag aaacttcata ctccctttgc tgttttttta atcctaactt cgaccctgtg |
| 12781 | atattgatca aggtactcag atccacagag atcaggacat tggacactct aggaaattaa |
| 12841 | tgagattata tgaaataaaa gttgagcgga acaagtaaac actcaatgta tgtgctacct |
| 12901 | ttgccagaaa acctttcctg acaactctca tccctgtccc caccacccat acacatgagg |
| 12961 | atcacacaca gacaggttag acgacctttt gatatactca cgaagcatcc tgaatgttgt |
| 13021 | attctaataa ctacctacgt gtctctctcg cctatttcta ggtcatgaat gcctcgagat |
| 13081 | atctgcgttt ttagcttctt tttgttgttg ttgagacaga atctggctct gtcacctagg |
| 13141 | ctggagtgcg gtggcgtgat ctcagctcac tgcagcctcc acctccccag ctcaagcaat |
| 13201 | ccccccacct cagcctcccg agtagcbggg accataggca cgcaccacca cacccagcta |
| 13261 | atttttgtct tattttggta gagatggggt tttactatgt tgcttaggct ggtctggaac |
| 13321 | tcctgggctc aagcgatctt cccacctcag tctcccaaag tgctgcggtt acagatgtga |
| 13381 | gccactgggt ccggctcagc ttctttcgtg aacaaacaat attttcctag tcacagctaa |
| 13441 | atcttttata cattttttaa accctatgca gacacattga acatttgtga ttaataactg |
| 13501 | attaattgtt agagactttt tttccccagg accttttcca gtggtgagtt taatggtggg |
| 13561 | atctgttgtt ctgagcatgg cccccgacga acactttctc gtatccagca gcaatggaac |
| 13621 | tgtattaaat actactatga tagacactgc agctagagat acagctagag tcctgattgc |
| 13681 | cagtgccctg actctgctgg ttggaattat acaggtaatg aacttacaag taaaatatag |
| 13741 | atggatgtaa tttttatttg aaattaactt taaagcatat agacttaaag attctactaa |
| 13801 | aaacaaaaca aagtaatttc ctggaaccca aaattatttt ctaaattacg ttgttttagg |
| 13861 | tcaggtgcta aaatagtaag caagacccca cttattaagg ctcacttatc atcaaagtca |
| 13921 | gagacagaaa aaagcacaga agaacatgtg tgattcaatt gaggatgaga gaagggaaat |
| 13981 | atacgggaat ccataaagga gaaaaagtgt tctggtgagc ggagacacag gaccgaaagc |
| 14041 | cacataaata agctctgggt ttttgctttt ctaagtacat gtatagaaat acttcaaggt |
| 14101 | ttttattaca cttagttttc aaattttaga gtggtggagg aaggggagtg atagggtatt |
| 14161 | aagaaattca tatttttttc taccagtatt tttgtgctat aggcaggcta ctagtgtttt |
| 14221 | cattggtatt aagcttgatg taatatttcc agagagtagg tttctatctc aggcaaacat |
| 14281 | ttaatttttc tttccttttc cttatcgtag ttgatatttg gtggcttgca gattggattc |
| 14341 | atagtgaggt acttggcaga tcctttggtt ggtggcttca caacagctgc tgccttccaa |
| 14401 | gtgcbggtct cacagctaaa gattgtcctc aatgtttcaa ccaaaaacta caatggagtt |
| 14461 | ctctctatta tctatgtaag tgttgcttct tgctccaggg atgggtcact gttcattcca |
| 14521 | gaaacaattg tattcattct ctgagtctgg gccaggcgtg gtggctcaca cctgtaatcc |
| 14581 | cagcactttg gaaggccgag gtgggcagat tgcttgagcc caggagtttg agacgtgaga |
| 14641 | cctcatctct taaaaaaaaa aaaaaaaaaa aagaaagaaa gaaaagaaaa gaaaaagaaa |
| 14701 | gaaaaaatcc aaaaatccga aaatttgctg ggtgtggtgg tgcacacttg tagtctcagc |
| 14761 | tacttgggag gctgaggtgg gaagatctcc tgagccctgg aggttgaggc tgcagtgagc |
| 14821 | tgtgatcgcc ccactgcact ccaccctggg tgacagagca agaacctgtt tcaagcaaaa |
| 14881 | acaaaatcaa aacaaaacaa aacttgagtc tgggagcacc cacatttctt tctttctttc |
| 14941 | tttttttttt tttttttgag acagagtctt actctgtcac ccaggctgga gtgcagtggc |
| 15001 | atgatattgg ctcaccacaa cctccacctc ccgggttcaa gcgattctcc tgcctcagcc |
| 15061 | tcctgagtag ctgggattac aggcgcccgc caccacaccc agctaatttt tgtatattta |
| 15121 | gtagagacag ggtttcacca tttgggccag gcbggtcttg aactcctgac cttgtgatcc |
| 15181 | acccacatcg gcctcccaaa gtgctgggat tacaggcgtg agccaccgcg cccggcctgg |
| 15241 | gagcacccac atttctctat gcatactttg ggagccattg aaaacatttg gttgcttctg |
| 15301 | tcagaaatac tattgtactt aaaaacatta atgaaaacaa agtggtctaa tgaagtaaag |
| 15361 | gctgctctgg aatgtaacag acttgatttc tagcctcagc tttgtctcta acaggtaagt |
| 15421 | gaccctggat acatcatgta gggtgctaat tgaaagctca gttttagaac tggatggacc |
| 15481 | ttgattcata ttctggctct actgtctact agccatgtga gccaatcacc atgcctcagt |
| 15541 | ttccttctct gcaaaattgg gttagtaata gtatatgcct cattggattg ttaaataaga |
| 15601 | atagataagc acttggccca ggggcbggta cataacaagt actctaaata aaggagttat |
| 15661 | tttgaaatga ttatttcaag ccatcttttc ttttttattg gtgaaatgaa atgattggag |
| 15721 | atgtatctct aaaagctttt tctaaccata agagtccgta aaatgcataa tgtaaatgtc |
| 15781 | tcaacaatta taaatgaaaa ggaacattag attcagagat gattcaccat gcaaaagaaa |
| 15841 | tgcaaaagca ggatgtagat cacactaatt agatttgaaa aaggttttgg atctaaaaat |
| 15901 | gtgttctaca taaagcatgt tattgatgct tgaaaaatgg tgataatagt aacatgatgt |
| 15961 | catcctagct tggggggaat gataccatac aaaaataacg tgtcaacatt aagaatggag |
| 16021 | tttgagtctt taaagaccca cctattagct tctaaaacaa tgtaaggcca tgtacacata |
| 16081 | tctaagaatt ggtgagtatg tcaataattg ctcaatttta taacggtgcc ataatcccat |
| 16141 | actattacac tccatccatt caacaaatat taccaagtgc ttactacagg ccaggtacta |
| 16201 | tgctaagcag tgagaataga cagaggaggc agaataacat agtgaataag atcatgaggc |
| 16261 | caggtgtggt ggctcatgcc tgtaatccca gcagtttggg agactgacac aggtggatca |
| 16321 | cttgatccca tgagttcaag atcagcttgg gcaacatgac aaaaccttgt ccctactaat |
| 16381 | aatacaaaaa taattagaca tgcattgtgg cacgcacctg tagtcccagc tacttgggag |
| 16441 | gctgaggtga gaggatcacc tgagctcagg aagttgaggc tgcagtgagc cgagatcatg |
| 16501 | ccactgcctt ccagcctggg tgatgggagt gagaccctgt ctcaaacaac aataacagca |
| 16561 | acaacaaaca aaaaaccaaa aacaaacaaa aaagatcatg gactttgaac ttcaacagac |
| 16621 | ttgagttggc atcttggttc tccacccact acccatgatg tttatactca acttccctaa |
| 16681 | gcctcagtgt cctcaattgt aaaatgggag tagtaatagt agctacctct tagagcagtg |
| 16741 | aggattgaaa aagaaaatac gtgtaaggca cttagcacaa tatctgtcac atagtaagaa |
| 16801 | ttgagtttat tattattatt atcacagatg aatagacctc atgaagctcg ccgttcattt |
| 16861 | cctcgggacc cagcctatta ggaaacatta gcaaaagttt ttgattcagc attatatggg |
| 16921 | tcattcttga tatgtttttt cctgtcaaat cctcagtttt ctattaaaaa agaatttttt |
| 16981 | tttttttttg agacagggtc ttgccccatt gcctgggctg gagtacagta gcacagtcat |
| 17041 | agctcactgc gacctccatc tccctgtgtc aagcgattct tccccctcag cctcatgagt |
| 17101 | agctggaact acaggtgtgc accaccacac ctggctaatt ttctttttct ttgttgaatt |
| 17161 | ttagtagagg caatgtcttg ctatgttgcc caggttagtc tcgaactcct gagttcaagt |
| 17221 | gatcctctca ctttggcctc ccaaagttct gggattaaag gagtgagcca ccatgtccag |
| 17281 | cccatatttt aaaattaaaa ttaaaatttt aagattttat tttggtagag acaggggttt |
| 17341 | tgcaatgtcg cccaggctgg tcttgaaccc ctggcctcaa gcagtcatct tactgcatgc |
| 17401 | ctcctaatgt gttgggatta taggtgtggg ccactgcacc tggccaatcc ttagttcttt |
| 17461 | ttgagacctc tgactgcctt attttgacag gctctgtaac ttttgcagct cctggcacat |
| 17521 | cttgctttta cttactttta cattttctcc atcaaatgtt cactcattta ttccttcatt |
| 17581 | ctcattcatt cagtttatct actcaataaa cacatattga atacttacca tgtgccaggc |
| 17641 | actgttcact ccctatacaa acccagtgac tcattaacct accaagacat ctcttactga |
| 17701 | gtattctcac ctcactgggc aaacattgct aggccttcat ctacacagat cgcaggaggt |
| 17761 | ccaaactaat tgttgacctg ggtccatggc catttcagga cccctgcaga acaggagaaa |
| 17821 | tagttcttct ggtctcatag gattatgttt aagaagaaac tttctgcaaa tgatttcact |
| 17881 | ttgacaggga caaaagtgag caggaaacac tagaccaagg tcaaaaatag tttttaaacc |
| 17941 | aagtgcagtc attatgtaac ttacttcctg ttgaatattt ttcttgaaat ctcagtttag |
| 18001 | catacagcat agaattttgc aagaaactcc tcacaggcca cccaagttgg aaaaggtatt |
| 18061 | tcagtcatcc ctatatggtg gtgaatataa gtttgctctt ctgaaaaaaa aaaaaaatca |
| 18121 | gcaggtctga aaacgattgc atagggttaa atgagccgct tagtctctga acagagaatt |
| 18181 | ttgcttatga cattaccatt gcaattatac atgaaagaat ccttcaataa atgcagagta |
| 18241 | gtagaggatt ctcccagaaa agactgtaag attgttgtaa aatactttac ctggagtgtt |
| 18301 | aacttatctt tgttctaagg ttgcactttg gtttgtcctg ccctctcccc caaaaaggtg |
| 18361 | ctgacaacta gaagtaacaa atgcaaagaa ataggggaga aaatattaga agaaaaagaa |
| 18421 | atcagttaat ttacaaatgt cagagatact ggatgtagga ggcagaaggg agaatgacag |
| 18481 | ggtattggca gcaatttaga attagtcaat acccttgatg ctaccatgta gctactcagt |
| 18541 | tatctaagta aatcccagtc cacttagggg ttgatttccc accactcaat ttgaatggtt |
| 18601 | tgtctcagta gacaagggtg agagctttga aagccaccac taagcttgat tagatttgtt |
| 18661 | actttgtacc tatttcagta tgtaaaattt atacattgta ttaaagtaac actttaagga |
| 18721 | ttgatctata catgtataca caaaagatat ggaaggaaat gcctgacagc aaaaggtggt |
| 18781 | cgtgaagcat ttgtgatatt cgtagagata aaataaacaa aaataaattc agttccaata |
| 18841 | gtaaactgat caattttctc atacacatta ttgggcataa ttttttctta cggtttcata |
| 18901 | aacacaggta atcctgggca agaacaaaga aattatctaa atgaaattgt cctaaaattt |
| 18961 | tccaaacaca gcaggaaata taataaaata ttatctatta ccaaaaagtt cattatcata |
| 19021 | atttgaatta tttggaatac taagctaaaa tacagaatta tatgtgtatc catactatta |
| 19081 | acatacttta tggtatttta acagtaaact aaattagaag tactgttcag tgtttttgta |
| 19141 | gagtctaatt tctatgtcgt taaatataat cttatattat tatataatat aatcttatat |
| 19201 | tattatataa tcttatatta ttatattata taatcttata ttatataatc ttatcttata |
| 19261 | taatcttata ttatatgctc ttatataata taatcttatt atataatctt atcttatata |
| 19321 | atataatctt attatataat ataatcttat tatataatat aatcttatct tattatataa |
| 19381 | tataatctta ttatataata taatcttatc ttattatata atataatctt attatataat |
| 19441 | atattcttat cttattatat aatcttatct tattatataa tataatctta tcttattata |
| 19501 | taatataatc ttatcttatt atataatata atcttatctt attatataat ataatcttat |
| 19561 | cttattatat aatataatct tataatataa tcttaactta ttatataata taatcttatt |
| 19621 | atataatctt atcttattat ataatataat cttatcttat tatataatat aatcttatat |
| 19681 | tattatataa tcttatctta ttatataatg ttatattatt atataatctt atcttattat |
| 19741 | ataatgttat attattatat aatcttatct tattatataa tcttatatta ttatataagt |
| 19801 | ataatctttt attatattat tacataatat ataagtataa tcttatatta ttatataata |
| 19861 | ttattattat acaataataa tgtaaactga ctattgcagt ttacatggtg agttttattt |
| 19921 | ctgcacagat taaactttct atcatagagc tcttcttaaa agattctgaa tgactactca |
| 19981 | atatgtaggc aacttattta catactcaga taccttgcat gatgcaattc tgtaatataa |
| 20041 | actgattttg gtttttgaac ctcgtgttac atttctaatc caccagacat actttttatt |
| 20101 | caaaggtcta attgattctc atggattaaa ctggaatcct gtagtgatta tttttgtaag |
| 20161 | gtaaaaatgt ttgtgtgatt gggataatga ttccaaatgt tttgtttttc aagttttaat |
| 20221 | ttttgcatct tgagttgaaa agtacacctt taatgaatag acaattcatc aaaatgttat |
| 20281 | acctagctcc tgaattaatt agggtcattc atcagaaaac tgattatgta aaggaccaaa |
| 20341 | cagcaatgat aaccttcaag cctctgggat aggtagggct gtttgctcct gtgctaaatg |
| 20401 | ccctaagttc ttgttatcgt gtctgcbggt ggtagttatc ccattttctt tttcactctg |
| 20461 | ctgtccctgg catcatcttg tttctgtcag tgtaaatgcc tttagcaatt ttcagtgact |
| 20521 | ctgaaaacca gacaaagtga atttgttagt actggatttc aagaaagagc aaaagtaccc |
| 20581 | tctgagtgaa agttcaagag tcttcctaca agttaaatgc ctgaactcta gtccaagtgt |
| 20641 | ttggtgggag gtattttgca tgcataatag cttctccccc atttccttac tcttcttgaa |
| 20701 | tgtgttccag agagctgagg ttgctggcaa agtgactcct agattactta aggttcatta |
| 20761 | agtacttaaa gttcattaag ctcatacata attgtcacca gattatcatt ataattattt |
| 20821 | taaaagtagt ttatctgtga aaataagtaa aatacatttt ataaatgtta taaactataa |
| 20881 | gatgctccat tattttatct tcctataaaa tatgtctata aaaaagctca tttaaagaaa |
| 20941 | agttaccttc actgtgagat tgtctcaaag aaatgtctca aagatacctt cttaaatcct |
| 21001 | gccttctaca ggactgaagt taatataaca aagatattag tgttcttcct tgggattctt |
| 21061 | ccttgctaat ttccttgaaa acacccttga ttcccagaag tctcctattt acaaaacaaa |
| 21121 | actagttttt cttgaattga ttcatctgtc tacttaaaga ttttttttgg ccagttgtgg |
| 21181 | tagctcatgc ctgtaacccc aacactttga gaggttgggc aggaggattt cttgaggcca |
| 21241 | ggagttcaag accagtctgg gcaacaaagt gagacaccat cccctgcccc cacctcctcc |
| 21301 | cgccccaatc tctacaaaaa ataaaatagc ctatttattg tactctctac aataaataaa |
| 21361 | ataaatatag atgcctgcct gtagctccag ctactctgga gggtgatgtg gaaggattgc |
| 21421 | ttgagctcag gagttcgagg ccactgtact ccagcctggg caagagagct aaaaaaaaaa |
| 21481 | aaaaaaaaaa aaaaaatttt ttttatgtta tcttagttca agtttgagaa ataaaattaa |
| 21541 | gtaccaaatt tattcccaaa aatgtatgct tgtcaggaga tatacctaat gttaaatgac |
| 21601 | gagttaatgg gtgcagtaca ccaacatggc acacgtatac atatgtaaca aacctgcacg |
| 21661 | ttgtgcacat gtaccctaaa acttaaagta taatttaaaa acaaaaaaca gaaaaaaact |
| 21721 | acagattcaa ttcagcttta ggaattaaaa aaaagatttg atgtaattat atcattataa |
| 21781 | aatcaaattt tttaaataaa acatgaaatt gttttaattt aaaaaaaagt atgcttggcc |
| 21841 | tatatgtcaa ttcaatagct tttctttgcc agaaagaatg aagtcagtct acctgtatcc |
| 21901 | acatatgaag tattttagga ttttttgtaa ttttttgtta ttatctatat cattcaggtt |
| 21961 | taggaaagaa ctttacctaa aatactggct aattgtgccc caaaaaaaag aaagctagaa |
| 22021 | agaaagaaca cacacacaca cacatacaca catatacaca cacaaaaaaa acaaccaact |
| 22081 | gatcaactgg gagtttcagg tttatcagcc tttagtctca atgctgtatc actgtagtaa |
| 22141 | aaatcaggct acttgatagc acctagaaac ccattttaaa atataaactt gtaaagcatt |
| 22201 | tctgtaagta aaagttagta tgtttataat gacatttttt cttttaagac atctttatta |
| 22261 | ttatcataaa aaatacagag aagcaaaaat aagaatgtag aaatcaccca gtttttcctt |
| 22321 | tccaagtaaa caatcataaa aaacttggtg tatatatata ttgcagcaat tgtatgtatg |
| 22381 | taatggtctc tgtatcaacc aacacatttt tatcatttta ctgaaacttt tgagtgttgt |
| 22441 | ttgatgctga tatcatggtt tttcatgtgg gaagattcat atgagaattg attgtgtgtg |
| 22501 | tgtgcgtgtg tgtgtgctcg tgtgcgtgta gcagcaggaa gtatataaaa ttattttctt |
| 22561 | tttatagacg ctggttgaga tttttcaaaa tattggtgat accaatcttg ctgatttcac |
| 22621 | tgctggattg ctcaccattg tcgtctgtat ggcagttaag gaattaaatg atcggtttag |
| 22681 | acacaaaatc ccagtcccta ttcctataga agtaattgtg gtaagtagaa tatgtagtta |
| 22741 | gaaagttcag cattatttgg ttgacaaaca aggaattatt aaaaccaatg gagtttttaa |
| 22801 | catcttttgt tttatttcag acgataattg ctactgccat ttcatatgga gccaacctgg |
| 22861 | aaaaaaatta caatgctggc attgttaaat ccatcccaag ggggtgagtg tggtgttcct |
| 22921 | cttagtacta atacattaag tcagtaagtc agtctttttt atttaaataa aaccttttat |
| 22981 | tacaagcttc atttcactga tactccttca atagtcctat ttgtgtgtga tctggaagaa |
| 23041 | acaaccataa gacaaacagt atgtgtgtag ataaacgtca agccatttgt ttaaaagcag |
| 23101 | cccgtatatg ctcttttttc ttcattttct taaaacatgg cagaacatgt acggttaaca |
| 23161 | ccagagtcct gatttaaact tatacataac attataatat aatataaata gaatcatttc |
| 23221 | tcagtaacat ctattgcact gtgaacaatc tgcttaagga atcagggacg tctggcctaa |
| 23281 | attctctatc atttagttta atcaattttg gataataatt atatcctcgt acccataagt |
| 23341 | aaaatgcatt atcttcaagg gaagttttag aaacatttgg tagtttggtg aattagaaga |
| 23401 | gtaaaagatc aaggtccttc attcatctct gtcaccttcc agttttgtga cctgaggaga |
| 23461 | ttctcctata taagacaagg ataatgaaaa cagccgaagc ctcaactcaa gcttattatg |
| 23521 | aaacaccagt gagatctctc atgaaatgaa gagtagtcaa gacaccctac accataattt |
| 23581 | tctcatatgg ggttacaaag gaggcctaga cgtttattat atttgtaaca tacactcata |
| 23641 | acatttaaga ctagacttgc tgttaatcaa gaagtactag ttttccctaa gactggaaga |
| 23701 | gtttggtacc ggtgtttcta ccaggaaagg gagtggaggg gagggaaggg cacggagcca |
| 23761 | ctgtttggta ccagtgtttg ttttccatgc tcttaataga aacttcctca ggcaagctta |
| 23821 | ttcccagagc ttattctaca gggaactgct gtattcccat ttgatgaatc ttataatttc |
| 23881 | ctctaatatc tgttccaaac tatttgaaaa agcacagctg gctacatggg acttaatttg |
| 23941 | catgctatcc attacagtgt ttctcaaact tacccttttg taagaatcac atgggatcct |
| 24001 | ttttcacaca gattcctggt tcccacccca aacctattga atcaggcttt ccagaggtgg |
| 24061 | ggctcaggaa ttaatatttt tcaaaagtgc ctcaagtgat tcttgccctc aaggaaactg |
| 24121 | gagaaactct ttaagagagg atcaacaaat ctaatctaac aactagataa tttcattagt |
| 24181 | tagaaacaat tacagaaaaa gatactttac agatctcttt tgtcaggctt cctaggatgt |
| 24241 | atcaagttat aggtggtcca cagagcaggc cctgtcccat ccatccgtgt tccattagtt |
| 24301 | ggtttaggga actcatttct tctgccctaa attatccctc caggtcctct gcagagcttt |
| 24361 | cctgtgctct cctcctgaga acagatttct agcctctcgc ccttgagttt aatgaagctg |
| 24421 | aatcctttga cagaccacct ggtcagcttg gtcagctaat ttaacctgcc tggccccagg |
| 24481 | gactttaagc tactccatga gggcagtgac cccattggtg ttgttcagct ctgtcccaga |
| 24541 | gcacagagct catctcacag taagctctca gaaaacactt gttgaaggaa taaaataccc |
| 24601 | aagcctatgt cattataaac aagccacaac aaaggccttg gttatctgat ctcacttggt |
| 24661 | agcacagaag caattctgat gatattaaca aacctgaaaa agaaagggag tggagagatt |
| 24721 | ggaaaaaagc aagcagagtt ttaaagtggc cctgaggtga gcacagtgaa aggaagaggg |
| 24781 | acagagagat tgtgatatgc ccccttttga tctcctccct gcttcaatcc tccattaagg |
| 24841 | ctgctgctcg tagttccctt tatcctattg agggtccata agttaggatc actcctaacc |
| 24901 | taggaccata cgttaggacc ataagttagt ccccaataac aatgccccat tggacagcca |
| 24961 | aaaacagtgg ctccatgccc ttccctctac tccctttcct ggtagaaaca tacaactttt |
| 25021 | ccttgtccag tcaacaccta agcgccccac taggattcac tcattctccc atcctgggtg |
| 25081 | ctttcttaac cagcagacac tatgagggcc agtcatgtgc ctctcttctc atgcaactgg |
| 25141 | tccttatctg caactcgtaa tctgcccagt tcctcactca tcctgcccag gcttctcttt |
| 25201 | tacctcttct gttatagtgg tgtgtgtgtg tctgtgtgta tgtgtgtgtg tgtgctcacg |
| 25261 | cacgtgtatg tgtaaaccca taacaagatt gacagctctg tcctctaaat tttaatccct |
| 25321 | attcactctc ttgcctcctg tccttgccag ttccagaggt ccccttgttg tcatgtttgt |
| 25381 | tactctcttt tttcttttct tttctttaac agagtctcac tctgtcaccc agcctggaat |
| 25441 | gcagtggcat gatctctgtg gtgtgtgtgt gtgggtgtgt gtgtgtgtgt ataaacccat |
| 25501 | aacaagattg acggctctgt cctctaaatt ttaatcccta ttcactgtct tgcctcctgt |
| 25561 | cttcgtcagt tccagaggtc ctcttgttgt catgtttgtt actctttctt tcattctctt |
| 25621 | tctttcttcc cttccttccc tcccttccct ccctttccta ccttccctcc cttccctccc |
| 25681 | ttccctccct ttcctacctg cactcccttt cctccccttc ctaccttccc tccctttcct |
| 25741 | ccccttcctt ccttccttcc tctctctctt ttttctttct ttctttcttt ctttctttct |
| 25801 | ttctttcttt ctttctttct tttctttctt tccttctttc tttctttttc ttttcctttc |
| 25861 | tttccttttc tgaaacagaa cctcactctg tcacccagca tggaatgcag tggcatgatc |
| 25921 | tcggctcact gcaacctctg cctcccaggt tcaagcaatt ctcctgcctc agcctcctga |
| 25981 | gtagcbggga caacaggcac acactgccat gcctggctaa tttttagtag agacggggtt |
| 26041 | tcaccatgtt ggccaggctg gcctcaaact cctgacctca ggcgatctgc ctgcctcagc |
| 26101 | ctcccaaagt gcbgggatta caggcactgt tatagacccc ttttgtcagg tttcctagga |
| 26161 | tgtatcaagt tataggtggc ccgcagaaca tgccctgtcc catcaatctg ggttccattc |
| 26221 | attggtttgg ggaactcagg cctactgttg tttttaaagt atgtgctttg cagttgtact |
| 26281 | tgaaagtgtg gcacaggggc aaagccaaca aaaccacagg gtttttttcc tggctgcttt |
| 26341 | ctgagggcta ctcttctcct ctagctggag tggtggtgca tttgccaagt gttcagaccc |
| 26401 | agtctgaagt actctggtat tctgtttggt attctgttta tgacgctggc ctgtcgtttg |
| 26461 | tggaattttg ggcccttcag ggttcacttc tcccggtctt catcttttca gataagtgtg |
| 26521 | tgttcacatg ctcactccct tgggctcttc atagtgttgt cttatgatca ggcctgacat |
| 26581 | gcttggctgg ggccaaacag gcccactgag caaaaaattt ggagagttat atccacagaa |
| 26641 | ggagggcaag ggcaagggca aggacaaaag gcttacttac aggtcattag aagatatcca |
| 26701 | gacgggactt caattggttt ggggcaaata attggcacac ttagggttca gcaagacagc |
| 26761 | agacatgagt ggcaggagta tgacagactt agattctccc aatatatacc aagaacctac |
| 26821 | tatatgtgta gacactaatt acttacttac acaagtgatt cctcattgaa tcatatgaga |
| 26881 | agaatatata gtccccattt gacagctgag gaaactggga tgtggtgggt ttaaataaca |
| 26941 | tgcctaaagt catttgagag tgattctggt cctttgactt aagtctttgc actttacact |
| 27001 | ttgcacacct ggataatcaa ggatcaggtc atatttggag aactaggcag ccaggcaggc |
| 27061 | aaagtgcatt aggctgctat caaaactaag ctgtatgtga aactggaaag ttatcctgac |
| 27121 | aagtccgagt gacctgaagt agggttgact gggtctcagg agcaagtcag gagcctgttt |
| 27181 | tgagaagtgt ggtcccaagt cacatcccaa ctagcaggtg atgtcatgct gagtcgccca |
| 27241 | actgttggat cagggtttcc aacatcctgt ctgtctacag atggggttca ttccacagtc |
| 27301 | tcattgbggg gtaggatggg atataaggag aaaaggagtc tgaaaattaa cctcactggt |
| 27361 | agggagagta aggctacaag ggcagagaac cagacagatc ttgttaggta ggaaatcgtc |
| 27421 | taatatctaa catttagacc tggacccact aactgacatc aagcaaatca cttcacgttt |
| 27481 | ccaggtctaa gttcctttat caacaagaca agacaagagt ggtggattca acaataccta |
| 27541 | ggatgctttc tctatggttt tctctaagaa ccttatttct attttatttt taccactgtt |
| 27601 | ctctaattat aggggaaaat gtagtttcct tattaaagaa actttaggca taagtgatgt |
| 27661 | aggtcgggga gacctttcat ggcbgggggc ctctggaatt ataccatatg gatagtcatc |
| 27721 | aagatatagg tccatctccc aaattttcat atttgagaga acctcgtggt ataatgtgta |
| 27781 | ggttaatttt tttatatggt ttgtagggta gctctggttt tgtcaaacag tagtcattgg |
| 27841 | accccacaat cactgagata ttttagtcac tatggagcgt tgtgataatt acattaattt |
| 27901 | aatctttttt gccttaagaa gattttaaat gtcctggctc tcaaaggatt ttccactgag |
| 27961 | ctcttttagc ttcatacatt ctttgtctct ttaacagagc tgatacctct tcaaacacag |
| 28021 | taaatctcat attatggcta gaatctcttt taaattcaaa gaactttaag atggaattgt |
| 28081 | ggaaggagaa acactaacat gtgaaatggc atggatgggg ctgtatgata ttaaagaatc |
| 28141 | agtaacagca gatttattca tgtgagagat agagaagagt cagcatggct aggctcaaaa |
| 28201 | atagaggaca aagaaatcag ccagtaagat aacaccaact tctgattaaa cattataaaa |
| 28261 | gctgctacta tcatgtatgt atttcgtgtg ctttttgttc ttttggatca agtactttca |
| 28321 | tgtctaatat gtgactgagc agatatagca tttgatgaga tggggaaaaa ggatggtggt |
| 28381 | caaatcttca cagcattttt cacttaaaaa ctcactaggt ttttgcctcc tgaacttcca |
| 28441 | cctgtgagct tgttctcgga gatgctggct gcatcatttt ccatcgctgt ggtggcttat |
| 28501 | gctattgcag tgtcagtagg aaaagtatat gccaccaagt atgattacac catcgatggg |
| 28561 | aaccaggtat gggtgccctt ttgctgaact ggttttatag ggctggaaac aggaaaaaaa |
| 28621 | cataaatgga aaagattttg gtgtcagcta aagaaggggt tggattcttt caccagacct |
| 28681 | tattgggttg gttttcctct tgtgtttgct aattagaaat tattttggaa tagacacact |
| 28741 | gcatcacttt gcttttttaa gaaataagtt gaaataacac taattttaaa agagctaatt |
| 28801 | cagtcaggtc ataaataaca ttcaaagtga acatattagg tcagaaagag aattcttcat |
| 28861 | gtaacccagt acctcttggc aattattttt aacggcagtt ataatgtgac aaaacagtgc |
| 28921 | aacaaacatt aataatagtt gtgaccactt taaattgagg tggttcactg tgcagttaat |
| 28981 | atatacaggc aatttttgta ggcatgtgat acattgccag gtaagctgat ttcacactgc |
| 29041 | ttgcaaattt gcaagttctg tatctatatg tttctgaaaa tacagtatag caataacagt |
| 29101 | agttaaatgg ttagtaatca agcagaataa cagcactgct agtcataata tgcttcatag |
| 29161 | tgaatattca accacagaaa aacactttat gtgagagctg cagacattcc attcactagg |
| 29221 | cagtgaaaaa gcttagcaaa tgatcaggtg ctatttcttg tcaactttaa aaattatcga |
| 29281 | gagcaatgag acctctctca gatggtatgg cgtccaaact cctgatgtcg tacaaggacc |
| 29341 | ccaagtacct atcacggtaa aaattaaatt ggaccaccac gcagagtagg catgggagtt |
| 29401 | ttcattctta atgtacttcc tgaaatactc agcgaaggtc ttgcaaagat tcaatttgta |
| 29461 | ggatcgttgt catccagtct cttccttagg aattcattgc ctttgggatc agcaacatct |
| 29521 | tctcaggatt cttctcttgt tttgtggcca ccactgctct ttcccgcacg gccgtccagg |
| 29581 | agagcactgg aggaaagaca caggtaggaa caacagcctt atgatatcca tctcagagaa |
| 29641 | caagtcgagg aatggcaaca gaggaaggct cgcaccgagc ttagcaggac aatttgcctt |
| 29701 | tcagacttgt acttcctaat ctgattcacc tcaggcctat tcctcttgtt ccactccctc |
| 29761 | acctgaaatc tcttaaaaaa caacatgtat ggttttctga tacagtgatt ctcaaatcta |
| 29821 | tttgtcagtg cttacctgtc atgtagctac acttacctgc tgtggtcaat aacaactgac |
| 29881 | aaggaatcag taatgaagga tgctgatttt tgttaatttg ttacctgggg agacagatgg |
| 29941 | cctggtaaaa gcgcttcctg gctttaggag ctattctatt ttcaggaaag tgaaaagctc |
| 30001 | tattcacatt tcctttagaa ggatcaggaa cttcctccag gggcgtttgg tcccacagaa |
| 30061 | caacagtttg ctagccaaga atatttttgt tgtaacattt ttggcatttc ttcctgagta |
| 30121 | agatttatgt tgttgaagtt ctgcatgtgg gtttaatctt atcttttaaa tgtggtttgc |
| 30181 | agttgttgcc tttacaaggt ggccaaaaag ccagcatcct agttaatctc tggataatcc |
| 30241 | ctccttcagt gttcagaaag ctcaggagcc atactcaaag gccactcttt ccagcaggac |
| 30301 | acagtcgaag agaccacacc aagcagatgg gcacaagaga cagactcagg aattttgctt |
| 30361 | ctgtctctta tgccttgagg tccttatctt cccaacacag aaagaactat tatttaggag |
| 30421 | taagaagtgc attgagactc caaagaacaa caaacccaaa ctacatagtg caatacacac |
| 30481 | acacacacac acacacacac acacacacat gcacacacac atgcacagtc ttcacagtct |
| 30541 | tcaaatgggt tttactaagg cggggacact taaaaaataa atataagtcg ggcacagtgg |
| 30601 | ctcatgcttg taatcccagc actttgggag gctgaggtgg gcggatcaat tgaggtcagg |
| 30661 | agttcgagac taacatggcc aacatggtga aaccccttct ctactaaaaa tgcaaaaatt |
| 30721 | agccaggtgt ggtggtagat gcctgtaatc ccagctactt gggaggctga ggcaggagaa |
| 30781 | tcacttgaac ctgggaggtg gaggttgcag tgagccaata tcgtgccact acattccagc |
| 30841 | ctgggcgaca agagctagac tctgtgtcaa atatatatat acacacacac acacacacac |
| 30901 | acacacacac aaacatatat atatatatat attctcatat atatatacga gaataactga |
| 30961 | aaaaactaat gactccaaca gtgacttgcc cagggagggc tttaattgtc cccaatatgc |
| 31021 | atgtgatgct cctttcctat ttataatgga tcttgtgaca gacttggaag aattggcctc |
| 31081 | ttccagtttt ttggctgctt ttcaacaaaa aattttattt tcagaatttt tcttaatttt |
| 31141 | ttattttttt tgcaaatatt tccagctctg agggagcagg taaaataata cagctcatat |
| 31201 | ccggaggcat agccagagat ctgtggtcaa ggggaagagg tcagagccaa tttccaaagc |
| 31261 | tgtgcacatt tcaggctgca gcbgtcagca gcaggaactt ctgctgcttt catttgagac |
| 31321 | ggagcactga caagctctcc agagcacatg gtcttcagcg ggtgcaggca aatctcaaac |
| 31381 | tgctgatgtc cattctcctg atgttacctc caggctcaaa tgaggcatgg gctggctgtc |
| 31441 | ccagtaagta tgcccatgta aagtgacctc cttggcacag ggtttggggg ataatggtgc |
| 31501 | tctggtaagc taataccccc tgccacatac tggcatgtat tatatttagg aatgaaggat |
| 31561 | gccaggattt cagcattaaa gaatgaaacg agtaaagaaa tggcttcatg tttaattatt |
| 31621 | gaaatgtata ctaaattctg gggttaaaag tctaagtgcc tgaactgaaa tccagggact |
| 31681 | gatggacaaa taaactggca gggcttctct tgtgtggctt ctcgtgtttt ctcttatgtt |
| 31741 | ggaacttcag tttcagcatc tacaaaatgg aaatgataat tgcatccatt tcacagggat |
| 31801 | attgtgagga ttaggcaaga aaatgtaaag ccttagcaca tacttgtaaa tgctcattgt |
| 31861 | ttcactcctt taggcaagaa tagcatctta gcatctatga tacatatatt gtgcctggca |
| 31921 | cataagaagc acctggcata tatttgctga atgaatgaat ggaagaatga gtattggtgg |
| 31981 | acacgaactg tttttagcac atctacagat tgtagaagaa ttaaacattg gaaccttttc |
| 32041 | tttccctcac ccccatctga cttccactga ctcacagaaa agtaattctg attacaaacc |
| 32101 | actctttagc tctgattacc ccctccctta acagaataat tttttagtaa ctgaatctgg |
| 32161 | ttgtagatat aaagtctaca gagtttctca caaacaagcc ttatcaagta agtagaaata |
| 32221 | attgatcact caccaatttt aatatagtgg ccaaaatgag ccttggcctc ccataattgg |
| 32281 | agactcatta tgacatataa ttggcaagta ggtggccact ctcctggcat gagtttggca |
| 32341 | gctgactgtg gtccttgtcc ccaaatctcc atatctttct ccagttcaca gagctcccca |
| 32401 | tccacagtga gatgcaagtg gctcggtaaa tactggttga gtaattgcat gcaaggaagg |
| 32461 | aagggaggga taagggaagg aaagaaagaa gaaaatggaa ggaaggacaa gggagaggaa |
| 32521 | gggaagggat atgaaggaaa gcgaagagaa gggagggaag taggatatca gcttctctgc |
| 32581 | ttagtcagga gaagggaaag agcaccaggg tactgggaat ctaggatggg gataggaaga |
| 32641 | gcatagaaaa gccagccaga catacaaagc acgcttttta gtacctcata cacatcatat |
| 32701 | tgcctcaggc tgacccaact ataatctaaa tataaatgat caatttgcca ggtagagcaa |
| 32761 | gtgctttcta attttctgtt tatatttgct gtgtctgtct cccgtaactc agaccttttg |
| 32821 | cactagacag tacttgtgct caacaaaatc ttcccagttg tttcctctct gattgctttg |
| 32881 | cttgtagttc cctgtctcct tttcttcttt gtttcagagc ttctaatctt catcttggct |
| 32941 | ctgccccagc tgtctcaaca gagaattcat tggtcatcta atcaaacgag agagtagtcc |
| 33001 | ccaccccctc agcctctctc ctaactagta tggatcttag gagagctatt tttgccagcg |
| 33061 | aaggtaaagt ttctgaagct tccttttacc cctgctattg ccccgttact ccatagtcac |
| 33121 | tgtttcaggc tgccttgggg caaagctctg agcctgcctc cgtggaactg tcagaggagg |
| 33181 | caggagacac aatcccacct ctcaatgtgc aaatgtggca tttcgaattt gcaataggat |
| 33241 | gagtaaattt attttctctg agactttaat gagaccatgt gctacaagta cgaagtgtta |
| 33301 | tcagagttgc tattatagct gcagcttcaa taatgcagaa aaatcagcta tgtgccatga |
| 33361 | gaatttattt cccaagaata cgacaatgat ctctgttgtt gggaaagggg ggattggtcc |
| 33421 | atgtttcctg ccatggtaaa taactagaag cttggcctga atggacgccg aaaccgcagg |
| 33481 | tgtgtactat caccaaataa aatccctgtc aaactggctt taatttcata ggatcagtcc |
| 33541 | ccatattttc tttaacttct ctgccatagc atatatagat gccatttttg ttcagttttg |
| 33601 | tggcttgagc aaataactat cacttttctc gacagtattg agcagaaggg ggagacaggg |
| 33661 | aagtatgaag tgtgtctgtg aacaggctgt ctcatacaca catccagtga gctggaagac |
| 33721 | acaagggaga aggacgaatc cttttcatag gaggtgtgtg tcttccaggt tgctggcatc |
| 33781 | atctctgctg cgattgtgat gatcgccatt cttgccctgg ggaagcttct ggaacccttg |
| 33841 | cagaaggtat aaccctgctt ctctgcatac cgattgcata atttcccttc actactctgc |
| 33901 | taccagataa ataacaggag atttaacaat catcacatgg aaaaccattc cctgaataac |
| 33961 | acagccttct ctgtctctct tggcagtcgg tcttggcagc tgttgtaatt gccaacctga |
| 34021 | aagggatgtt tatgcagctg tgtgacattc ctcgtctgtg gagacagaat aagattgatg |
| 34081 | ctgtaagtca cctaccacct atatttatct gaaataagat ttggttctta tatgcttcct |
| 34141 | gccatatcac tatattcccc ccatccccta agtctcactt gtgctttggg aactccagag |
| 34201 | gagaaattag aattgbgggg ataaatcaaa gccatgaagt cttccatgtg aactgcattt |
| 34261 | tgtgaagatt ctgtatctct gggaaggtca atttccagca agaatcccat atgaggctca |
| 34321 | ttcatacacc tttggccttc taaacacaaa aagcaaaaaa atgtttaaac accctagttt |
| 34381 | agaaggacaa acaacataca aaacaatgca aaaacaaaat acaaaatgta aaaacccacg |
| 34441 | ctgactttaa ctctgactaa cataaccttt gcaactattc tgagaaacta aaaatcagaa |
| 34501 | gctaaatcct tcagagttcc tctctaattt aaaccataaa aagaatgaga agacttccta |
| 34561 | catattgata tggaaaattt tccaagacaa atcgttaagt gaaaaagaga ccagaataga |
| 34621 | aatgctgggg aaaagcacag acacaggcag aaataaaagc ggatacaagg agggagggaa |
| 34681 | gttgggaatg ggtggagaag ggggagggtt gtgagcaaga gttttcccct ttttaatgat |
| 34741 | aattccctta tgaaccatac aaatatatta gctattcaaa aatttagaaa taaataaaat |
| 34801 | gggacagttg gtcttaattg agaagcccag tttctacagc tacttaaata taaaatgaat |
| 34861 | gaagtcacaa tatttttaaa aagctgtgat ttggccaggc acagtggctc aggcctgtaa |
| 34921 | tcccagcaat ttgggaggca ggaggatcac ttgagctcag gaatttgaga ccagcctgcg |
| 34981 | taacacagtg agaccttgtc tctactacaa ataaaagatt aaaaattagc cgggtttggt |
| 35041 | ggtatgtact tgtgggtagt cccagctact tgggaggctg aggcgggagg atcacttgaa |
| 35101 | tccagaagat ggaggctgca gtgaactatc atggtgccac tgcactccag cctgggcaat |
| 35161 | agagtgtgac cctatctcaa aagaaaaaaa aaaatgtaat ttgtttgtgg atcattgatc |
| 35221 | ttatttttat aggtagttat cacatgatgg tacctgatac attaatataa ttcttttcat |
| 35281 | ttctattttt ttccctaggt tatctgggtg tttacgtgta tagtgtccat cattctgggg |
| 35341 | ctggatctcg gtttactagc tggccttata tttggactgt tgactgtggt cctgagagtt |
| 35401 | cagttgtgag taacgtaaaa cccagatttc ctataaacag aacaacacac tctgagcttc |
| 35461 | cttataccat tttgataaat atagtgaagc cactttcttt cgttatagtt actgtatatt |
| 35521 | gagtgcttct atgcattaag cagacagtgt tttacagaca tacttaatct tcaaaaatag |
| 35581 | cctatgaata gttttgatta gtctcattct acaggtgaga aaagagaaat tcagaaaagc |
| 35641 | taagaagcat ccctaagatc acacagctag tacgtggcag agctaagatt tgaacctatg |
| 35701 | tacctactca tgtcctctac tgcbgtgctc tccttttagt tgtggtaaga ctaaaaagta |
| 35761 | catagtttag ccaaaggctg aagttgcttt gtagtttctt ctttaaatga gatgaggaat |
| 35821 | gtaaggcgct cggccccagg cttgggacaa gacagcbgtt atatattata gttcattttc |
| 35881 | ttttttaaag ctagtaacca aaagttacat aacccagaac aggaggactt taaaatagct |
| 35941 | gatgacagcc aaaattcatt caaatctctc atataaccaa taaggcatat aaccaataaa |
| 36001 | ccacacaatt atgtgaagga aacaattagc tcatatgcag agtgaaggca gcaaagacat |
| 36061 | gatttaaata atggaaaaca gcctgtgagg gaaggtgagg agcctgaagg tggttttttg |
| 36121 | gttggttttg ttttgattct agagaggcct tagttaagtg ccctcctggg cctagagggg |
| 36181 | aacagagtct ttctctccct cctcaatgtg tccatcgtct ttccagactt ctggcccctg |
| 36241 | ctctgcctgt gcttgggccg tgaaagaaga agacacctgg aaaaacatca agatagatgt |
| 36301 | cttcagctta gcatccgctc acctctcctg tcccaccagc cagttctcct tcctgccctc |
| 36361 | cttccctacc ttggcatatt ggtgcctacc caaaaggctt gtgttttcta cctcagcatc |
| 36421 | ctaaatgatt gcccaagggc ctgagaaggt ttgcaggctc ccaaagttct caatttgctt |
| 36481 | ctaggacacg tctcagaaac gctccttaga agatgcbgtc tctcatgctg tatatgcctc |
| 36541 | agtgtctatt ttttcttgtg tggatgtggt tggaaaagaa gggttttaca gagagagatt |
| 36601 | agcttataaa cttttaagtt aaaaatcagc acaaacctgt aagccaagga ataactggtg |
| 36661 | gcacatttta gctgctagtt tggtatctag gcttttagcc aacaaaaagc agtatcctcc |
| 36721 | acagtattta atttccagta attatcatgc tgatccagag agcacaatgc tgaaagtaca |
| 36781 | ctaaacagat actctttctt caggaattgt atttagcatg tctctagtca cacatgaaga |
| 36841 | gtcacggaat ttatctgatt gcatcaggaa caagaaatca atagtctggt tgacaggaag |
| 36901 | gacttatttc tggtcctcca gtctcctatt tctataaaaa atgactaagt cacaaagaag |
| 36961 | cgccaggcac tggaagaccc aggggttaaa gacagaggct ctgctgccct ttacctccag |
| 37021 | gccttttctc acttctctta agaagtttag ttaacaataa aaatcaggat aatactgatg |
| 37081 | acctttcagg gttatggcag ggcttaaata agatttcaca tgcgtgaaag ctctatgctt |
| 37141 | atcctataac gtgttgtgca cgtgcaagta tgatgctcat tatttctctc agccatcaga |
| 37201 | agagaggcac agttctcccc tcccctgccg attccacaca aacaccagct gttcatttca |
| 37261 | gagttagcta caggaaaatg tcatctgcaa taaagacaga gtccaaaaca ccagaatgat |
| 37321 | gggctcttta gtagcbgttg tttttaactt tttattccaa aatacggctg ttccaaaaaa |
| 37381 | tcttgacctt gatatttttt cttctagtcc ttcttggaat ggccttggaa gcatccctag |
| 37441 | cacagatatc tacaaaagta ccaagaatta caaaaacgta agtacctttg tgagacattt |
| 37501 | gctggacttg ggtttactag cctgaagttt cagcagctcc attttacgta caaggtagcc |
| 37561 | aaagggagaa aatgcctatt gggaaagtct gttagtccac agggagtgtc atgaaaactt |
| 37621 | ttgatccagt gcaccttctg acacccatgg cttatgtgaa ttttgtctat gctagctgaa |
| 37681 | tgtctttttt tttttttctt tttagatgga gtctcactct tcacccaggc tggagtgcag |
| 37741 | aggcaggatc tcagctcact gcaacctctg cctcctgggt tcaagtgatt ctcttgtctc |
| 37801 | agcctccgag tggctgggat tacaggcagg tgccaccacg cctggctaat ttttgtattt |
| 37861 | ttagtagaga tggggttgca ccatgttgcc caggctggtc tcaaactcct gagctcaagt |
| 37921 | gatttgcccg tcttggcctc ccaaagagtt gggattacag gcgtgagcca ctgcacctgg |
| 37981 | ctagctgaat gtcattttaa tataaaactg ttgtaagagg aatttaaaaa taataggcaa |
| 38041 | tttctagatg ttcatccaaa attttgttta tctggtatat aattcttatc ttctgtaaga |
| 38101 | ttttctttat tcagttctaa caagagatta tcaagttctc tatgaccaag accttattat |
| 38161 | ttgacacttt gctttatcct tggtattaga agaaataaaa tatgacacag gaaatgaaaa |
| 38221 | acaaagaaat taaacatccc attgatggac ttgtgtcacc tgcaaataaa attgcttagt |
| 38281 | ggtgactagg ggaaacaaag ataaaaaagc agagaaagta aatcaagaaa atacaaattt |
| 38341 | agcaaataat aataataata atatcaaccc taggaagttg tagtctaatt ttaccttaac |
| 38401 | attaaaaaaa gttggacctt gaaactggga tttcagtagc tgctacttaa tttatttccg |
| 38461 | tgatctttct gttatgttga gccaagtgcc attaagagct aaaatgattt agagattttt |
| 38521 | ttggctttgg ggagggagct ctaagctgag ttagggaatt ctgacttcta ggctccatct |
| 38581 | tggtgagact ttgcccaagt cattcagcct ctcaggacct cagttttctc atctgaagca |
| 38641 | gctagactaa aattgctgat tcctgaagac tagaaaagtc tatgattctg tgattcctgg |
| 38701 | gttctatttt gggtgtggcc attgtatgtc agggtgagaa cagatgatat cataggcctc |
| 38761 | agttctgcaa atcccattga ttttgctttt tttctttgct acttttaaag aatgttagca |
| 38821 | aaatcaggag ggtcagtggt atgaacttca ggcaaatcat ggcactgttc taagcctcag |
| 38881 | tttcttttct ggaaatcaga gggttgaata aattgctttc taaggccctt tctaactttg |
| 38941 | accttctatg agactgtaga ggtccaagag tttttgtaac ctgttgtctc cctattcaag |
| 39001 | aaaagttgta gaggccgggc acggtggttc acacctgtaa tcccagcact ttgggaggct |
| 39061 | gaggcgggtg aatcacttga ggtcaggagt ttgagaccaa cctggccaat gtggcaaaac |
| 39121 | tctgtctcta ctaaaaatgg aaaaattagc tgggtgtggt ggcagcacct gtaatcccaa |
| 39181 | ctacttggga ggctgaggca ggagaatccc ttgaacccag gaggtggagg ttgcagtgag |
| 39241 | ccgacattgt gccactgtac tccagcctgc gcaacagagt gaaactccat ctcaaaaaaa |
| 39301 | aaaaaaaaag aaaagaaaga aaagttgagt gctgctaccc agctcctctg agcaactgtg |
| 39361 | acttgactcc ttgctaagta gccagaaatg taattaaata cttgaggctt gaaattattt |
| 39421 | aatcccagac aatttctttt aatgccagat tgaagaacct caaggagtga agattcttag |
| 39481 | attttccagt cctattttct atggcaatgt cgatggtttt aaaaaatgta tcaagtccac |
| 39541 | agtaagtatt ttatccctag aaatttgttt tctaacctct tttgagactt cattcattct |
| 39601 | acaagtattt actggggtcc aatcaggaat aggccctaga ccctcttccc tttgtgtagg |
| 39661 | gcaatgagaa ttaaaatata acatccttgc cttcaaataa tttacagtct atttggggat |
| 39721 | taaaaaaaca catatgttaa aacccaggta gtaataacta tgccagacaa aaacattaga |
| 39781 | gatgtttcta ggcagaattt gagtaagttt caaataagta gtatagacag ttgagagttc |
| 39841 | atagaaggaa gagatccagg ttagttggac taacaggctt tgtgcggcag ttggctgaag |
| 39901 | gaaagaaatc atgtcaagtg tttgagaact atgtgagctg agagacagtg gaaacatgta |
| 39961 | ttggaggtag ggttgcccag ttgcagcaaa aagtaaaata tactagtgga ataaataagt |
| 40021 | agaaaatcct ggcaccaaat gccatgctat gctttgaact tggagtttgc ctctaaatca |
| 40081 | gtgtttttct aagtgagttc cagggcaaac tgattcagag gaatgttcac agattttgca |
| 40141 | ataacaaaag ggctctgtga taccaaggga atttggaaaa cccagactta aactaaagag |
| 40201 | ggtattttgg ggtgtgtgtg tgtttctgtt ttgtctttta ctgtcttgga gcctttgata |
| 40261 | tgctactgtc ttctcagagc ttctgggtag gagtagggta gcctgggagt agacagagat |
| 40321 | ctactccatc agaccttaca atttcttttt tggcaggata gctcaaggaa ttataccctt |
| 40381 | tgagaaatag cctttccaga taacagttgc cattaataag ctttaggtgc caggcatttt |
| 40441 | aagtaacttg acatttattt ccaaaggttg gatttgatgc cattagagta tataataaga |
| 40501 | ggctgaaagc gctgaggaaa atacagaaac taataaaaag tggacaatta agagcaacaa |
| 40561 | aggtgagatg acatctttct tttccccctt aaattatttc ctttccctga tgagagcagt |
| 40621 | tagagggtct aaaattaaat ctatcctctt tagtatccag atgtgaatga acaaatgaca |
| 40681 | tgtacgtatc aaagaacaac tgagctattc ttataggcaa gcgggagtgg aagggaatga |
| 40741 | aataaaatca gcagcgctgc ctggaaacac aggatgtgat ttttttcccc accatgaaca |
| 40801 | gtgtctgcat tattttctat actttatttt tactgaaagg aacaaaataa gtgcaaattc |
| 40861 | aatgccagaa aactacccac catagaaggc agtctaagtc cataaacttt tggagctgtt |
| 40921 | aacttttact cagattcttc tggccagtgt atttcttggc aaagttccac aatcatccag |
| 40981 | aaaacaaaag tttcctggct cctctgttct cccagttttc ttcctagaca acatcaaagt |
| 41041 | ttgggctgag gtgaaaccca tccttaaaaa ttcatctcct tgatgtcttg cttaccaagg |
| 41101 | aacagtgtgt aggtcttttg gataatttga tatgaatggt tgaaagattt caaatctttg |
| 41161 | acaattaagt tgacagtgtt ttcttcgttt agaatggcat cataagtgat gctgtttcaa |
| 41221 | caaataatgc ttttgagcct gatgaggata ttgaagatct ggaggaactt gatatcccaa |
| 41281 | ccaaggaaat agagattcaa gtggattgga actctgagct tccagtcaaa gtgaacgttc |
| 41341 | ccaaagtgcc aatccatagc cttgtgcttg actgtggagc tatatctttc ctggacgttg |
| 41401 | ttggagtgag atcactgcgg gtggtaaggt tctggttttc tgaattatac atttggagct |
| 41461 | ttggcaatag taaaatgatg tgggttgtcc agtattgcaa cagggcaaat acatgggctt |
| 41521 | tgtaattttt ctaggtgaat gcttttgtaa aaaagtgtaa tattttaaag cataggctct |
| 41581 | ggagccagac tacctggggg agatactggc ttcaccactt actagcagta cgaccctggg |
| 41641 | caagttgctt aatctgtcta tatctcagtt tcttcatctg taatatggag gtaatgatgg |
| 41701 | tatctacctt cacaggttgt tacaaggatt aaataagcta atagatataa ggtgtttaga |
| 41761 | agagtgtctg gttcaggctg ggcatggtgg ctcacgcctg taatcccagc acttcgggag |
| 41821 | gctgaggcag gtggatcatg aggtcaggag ttcaagacca gcctggccaa tatggtgaaa |
| 41881 | ccccgtctct accaaaaata caaaaattag ctgggcatgg tggcgcacac ctgtagtccc |
| 41941 | agctcctagg aggctgtggc aggagaatcg cttgaacccg ggaggtggag gttgcagctg |
| 42001 | agattgtgcc actgtactcc agcctgggtg acagagtgag acttcatctc aaaaaaaaaa |
| 42061 | aaaaaaaaga atatctggtt caaagatact ccccagcaaa ttaattcaca tttattatgt |
| 42121 | tttatctttc tgagaatgta taacaagtgg tatatgaaaa gaaaaaaatg ggcaaaagtt |
| 42181 | tattaagtat tacatttcta tttgttatgt taacagcaac aggataagga ataccaggtg |
| 42241 | tatgttagga ctggaaaagc caggcattat taagaggtta gagtaggaag caggtcagac |
| 42301 | atctggaagg tcaaagcaag agttgaggag tatgcaggat agaaacatta atgatatcag |
| 42361 | aaaccagtta tgcaagctga agttcattaa ttctgtcaac aaatagatgt gaaatgccta |
| 42421 | atgtgtactg agcactctgc caggcacaag agactagtga tgaagtagac acagtttcta |
| 42481 | cctacgtggg acttagcagt ctggaggaga aggcaaacat taagtcatct tataaataac |
| 42541 | aattgtagta agtgctccaa agaagatgaa taggacatca cctgaagcat caagttcagt |
| 42601 | gaagcttcag gtaggtatca aaagggtcag gcagaaaagt aagcaggtca agacaccaac |
| 42661 | aatcagatgt aataatataa agctgactcc taactgaggt tccacttagc taaggcttct |
| 42721 | ttgctacctc tataagggga ggaaatgatt ccaggatgtg ggtactaggt aggtagggta |
| 42781 | gagaagtgat tgtgcttggc aaaagagtat gagaatatgc tgacaggttc tgttctagtt |
| 42841 | ctcttagcag attttgttat tagctcattt gaaatcactc ttgttctttg ttgtacattt |
| 42901 | cactctaagc attggctgag atccattgta gactatattg gccagagagt tcaatgaatt |
| 42961 | acttttgggg acagtcttaa catatttaat gccagaatat ttcccacaca acgaatattt |
| 43021 | actttcaaat attataatga cagttatgat agctaaagaa gactccaaac tttatacttg |
| 43081 | aacagaggtc ttgatttgtt ttcctccata attctcaaat tctcttttat tattgactat |
| 43141 | gggtcttgtg tcttgacttt ttaaaattaa atgtttattt tgacataatt gtaaattcac |
| 43201 | atgtagttgt aaggaataat atttagatcc tatatacccc ttacccagtt tctcccaatg |
| 43261 | agtaacatct tgtaaaactg tagcataaaa tcacagtagg acactgacat tcaaaataga |
| 43321 | ggccttgact tttaggtcaa tagtaacatt ttgaacccga taagcatagc cacacccata |
| 43381 | tctcttctcc aatcagcagg gcctatatta agaagcctcc tgtactctct tctttccaca |
| 43441 | aatgcttatt tagcacctcc acgctatcaa gtgcbgtgct attgagcgct ggatgttgcc |
| 43501 | atctcttgag atataatcct aattatacca ttactgtagt ttgaaaacct ccatggtttt |
| 43561 | gcaataataa cctttcctta aagtcctgat taaccatgaa agtaataatg tttctcctga |
| 43621 | gcaagtaact gaatgctact gaattatggg cagataaggt tgttaattgt tacaaactct |
| 43681 | ccttttttat ttttagattg tcaaagaatt ccaaagaatt gatgtgaatg tgtattttgc |
| 43741 | atcacttcaa ggtaaataca tatatctaca tatctacctg taagactttc ccgtaagccc |
| 43801 | tttctcctat ctgggactgt ggtcacatta tgtctgaagg cctttttttt ttttctttta |
| 43861 | aagatctcaa ttgtcattat ttgcagttct ggaatctggc actgcttcat tccataaaac |
| 43921 | agaataagtg ttccaaggaa ctaagcagga gttcagtatt atacacagaa aaggccaaag |
| 43981 | acagcaaaag caagcaacaa agagtatatt agtccattca aagttacttt cttgtaagtc |
| 44041 | agagacagtg agacagaaca ataggaaaat aatggattag ttaacatgag gtcatgtcag |
| 44101 | gatacttttt tgtatgagga ttattgcaga ggaagcttta ttattatgcc aactggaaat |
| 44161 | ttaaactgtc ctgttttagg aaatttgcta ttacctctct ctcctgattt cttcaagtat |
| 44221 | cagataacaa tttagtttag gtttgataac ttgaaacttt agcatgagtg actccatttt |
| 44281 | gatttttagt cttgtctgtt gtcgtctagt gcgggagctt agtctaaaac aatggccttt |
| 44341 | tatttttatt ttttatttta ctatgtgcct gtgccttgca tgaccccagg atgggcacag |
| 44401 | ctgcttggcc cctgagccac cgaaggctgc tctactcctt cgttctggct actaaaagct |
| 44461 | gcaaagctct gggagggcaa agctcaagaa gactaaaaca atggccttta ccatttttgt |
| 44521 | ttgatgattt tccccgtttt gatcaggctc tcacctaggt aagagtgaac aaaatgtagg |
| 44581 | agatcagtgc tactctgtta ccatcatttt gggtttctgg tctcaggagg tcatgtgtag |
| 44641 | cttatggtgc cctcctcatt atcatgtatg tctctgagtt tttgttgttt cagagagaga |
| 44701 | ccattcgatg tctgacaggt ggctttttgg aaacatttaa aactttgaga gggtataatg |
| 44761 | taccaggaag actgctatta tgactatcag ggagataata ccaagggttt atagtatgct |
| 44821 | ccttagccag gattctcatg aatcaaacca actaaaattg aatagcctga caaggagact |
| 44881 | acctgtttta accaagaagt cttctctgta gtacctgatg tatttatata tgtggaacaa |
| 44941 | gaagtgtcac ccaactgcac agatgcttcc ttgttgagtt agcaggtaat ctagcattcc |
| 45001 | atgactggtt aaattaaagc agaaagtgta agttacccaa agaagctact cattgtgaag |
| 45061 | ttttaactac agcactatcc tgccaagtga aagaggtagg cacaagtaag ggaaaattaa |
| 45121 | aagggataag catcttatga tagggagtct tgttctgaca gtcttggagc tgtctacagc |
| 45181 | atgaagttga caacttcttg ttttggtttg tagttttatt gtctctagtt gtggcatcca |
| 45241 | gcattctggc gaactctcta tgtggcccac agtttaagca tgagattcat ctcttgaaat |
| 45301 | ttacactgag ttgctcagct tcagcttaca gagcttcagg aactgagtag ttcttggtct |
| 45361 | tcattggagt gttgtagcca gatattagtg aaagctaaaa gaattaagaa tccagctcag |
| 45421 | tctacaggta gataataaaa actcataaat attgaacagg gctacagtct aagaacagtt |
| 45481 | ttactatgct tttcttttga accatatgtt tttctttcta tagtcacctc catttctatc |
| 45541 | aaagacgatc atggtagacc aatttgttta caaaataagt ttggtctcaa acttggcctg |
| 45601 | attgattatt tacacagtac agcaagaata actacatagg tgactccttt caaatttgct |
| 45661 | ttgccaagcc tggcgaggta ttgcttgcct gtgagcccag ctacttggga ggctgaggtg |
| 45721 | agaggattgc ttgagcccag gaattcaagg ctgcagtgca ctatgattgt gcctgtgaat |
| 45781 | agccactgca ctatagcctg gacaacacag tgagaccatg tctccaaaaa ataattgctt |
| 45841 | tgatagaaat tttgacaagg aatctcagat tggacttttt aaaacgtctt gatgctatga |
| 45901 | agtcaaacca aggcagacat taggctttgc ctgatgtatc taatatcttg aagttactgg |
| 45961 | gcctcccagg aaggaacgac tttttattca ctcattgtaa ggctagcagc ccttgaagcc |
| 46021 | aggaattctg tgcacatttt caaatatgat attctattca aagccttgat aatataacca |
| 46081 | atgttttcca attgtattct atttaaaaga acagattcta ttgaactttc atgtaaataa |
| 46141 | tcatattgcc ataaaaataa gaatactcac aaagagtttc caaattctgg aaggatcagg |
| 46201 | tagagaggaa aagcaaatgt ttcaattttt gtttatgaaa gtatgcttaa caaggctggg |
| 46261 | tgcggtggct cacatctgta atcccagcac tttgggaagc caaggcggac aattgctttg |
| 46321 | agctcagagt ttgagaccag cctggcaaca tggcaaaacg ccgttactac aaaaaataca |
| 46381 | aaaaattagc tgggcatgga gcctgaggct gagaatcact tgagctgggg aagtggaggt |
| 46441 | agcagtgagc ccagatggtg ccactgcact ccaacctggg tgacagagtg agaccctgtc |
| 46501 | tcaaaaaata aaaaaaaagt atgcttaacc aagtggctgt aaactgcaga tagctttaaa |
| 46561 | gaaaaatttt ctttagatct ggaaaacaaa tattaaaaga accagcaatg tttcaaataa |
| 46621 | aaaagccata aaacctgtaa ttcttctcca tcagttcatt cagtctcatg taattaattc |
| 46681 | ttgctctgtt tgatcttggc tggtagttta attccaacga atggtatgaa ttcaaagtta |
| 46741 | ttagaaacct gtatttgtca gagttctttt cattcttccc atataactct ttgaagtcac |
| 46801 | agcactttag aattataatg gcttacaaag agctttcaga aaaagtatca gaacaaaaca |
| 46861 | attaactgtg gacaacaaga cttaaagtgg ctatatttaa agatctgatg tgagttaccc |
| 46921 | aattgacaag gatatttgga tatttctgtg gcacacaaca atttaaaata accaaaatta |
| 46981 | tgactggtag catttatacc aagacctatc acatttctag gaatgttata taattttgga |
| 47041 | acatattaat aacatatcta taaaaatata gcacaaagaa agttaaacat catttcttat |
| 47101 | tttaacagtg cttcccatat aatttaacct atcagataag gccatttggt ttaacatctc |
| 47161 | tcttttacag attctttaag aaattccagg gtcctctgga acatcccaaa gttagttcaa |
| 47221 | ggtcaaaaag acttaatttt gatttttgag aagtttgtca aataccaaag gtttaaaaca |
| 47281 | tttgatcaaa atcggatcat aggtcactat gaaataaaac caaagtgaaa aaagagttca |
| 47341 | aaggcaaaaa gcacaagaag agttatattg atgaaacatg aaatctctgt tttctaggcc |
| 47401 | agttacctgg aagagaaaat cctctcacaa ttttctatta agagtaaacc aatcctctga |
| 47461 | gaaaactcta ttgttccaac acataggccc acactttagc cttccatcag tgtactttaa |
| 47521 | tattaatgct caatttttag aaaaacttat aaataattcc cttctacttt tagccaactc |
| 47581 | aatcacataa aatttttcat gatatttatc ttctacaaac cttctacaac ttgcttaaac |
| 47641 | cttcatttgg tcctatactt ccttttttaa aattggcatt gtaccttagg acaaagattt |
| 47701 | acttttcttt tctccttatc attttgacca tataaggtta tctcctatac aaaagaaaaa |
| 47761 | attactctct tttcaatttt ctttatctct tcatacttgt aaatttcttc tcacatcttt |
| 47821 | cctacctagt ggttccttcc tgccttgttt tgatttcctt cataagtcca tatttagaaa |
| 47881 | caacctttaa ataacctctg attgccaagc tagagttaag ttttaaataa ataaataggc |
| 47941 | cggtcatggc ggctcacatc tgtaatccca gcactttggg aggcaaaggt cagaggatca |
| 48001 | cttcaggcca ggagtttgag accagcctga gcaacatggt gagaccccgt ctctattatt |
| 48061 | ttttttttaa aaaacaaaaa gcataaaaac tctgagaaca ttttgaaccc agaaagatat |
| 48121 | tacttccaat ttgtgccaca gagctggtaa tgtatggaaa tgtgtatctt gacagtgggt |
| 48181 | gggggtgggg tgaatattga caatgggggg atgttgttat gaggagagca aagctggaga |
| 48241 | ttacttagat tccttagaac aggaggactc tcaagggtgt gagtctctgt gtgtttcttt |
| 48301 | atgaatgtat gtgtgtagga aagtgctaag gcttaggttg aattctttag cagcagagcc |
| 48361 | caagatgggg attcttgcac aagcgattta ttgagaatac atctgaggaa atttatgaag |
| 48421 | cagtgagggg agcaggatag ggaaggggaa gaagctgatc aaagacatgg tttctgaagt |
| 48481 | ccagcgtaga tccctgattt cacagggagc accaccacag gaagagtacc agaaggttat |
| 48541 | gcctccttga ggcaagagga cctgctttct cccccagtaa tgagtcagtc agtggctgca |
| 48601 | ggccagccat gtgtggggat gaaacctccc agttctcttt atttacttat ttatttgaga |
| 48661 | cagggtcttg ctctgtcacc caggctggag tgcagtggtg caactgtggc tcactgcagc |
| 48721 | ctcaaactcc tgggctcaag tgatcctccc atctcagcct cctgagtagc tgagactata |
| 48781 | ggtgcacaac cacacctggc taatttttgt atttttttat aaagatgggg tttcaccata |
| 48841 | ttgcccagaa gttctgggtt caaagtgatc tgccctcctc ggcctctcaa agtgctggaa |
| 48901 | ttacagaccc agtcctcttt agatgacaca gctcccaacg ggcaagggaa agtctccaga |
| 48961 | gaagggcaca gctgtgaaac attggcagcc tggcccacag cagcaggagg atggatacac |
| 49021 | tggcttggcc aaagggacgt gatcgtccac aaggttgact acgaccagtt atgggataac |
| 49081 | cattctatat actactggaa aagaaactgt catttcaaat ctgggtcaca ttttggataa |
| 49141 | gagaaaaata aataaataaa aggaggagct acaaaaactt agtataggtt gatgctttaa |
| 49201 | aatttctttt cttagcbggg catggtaggg tgtgccctgt agtcctagct aattgggagg |
| 49261 | gtgaggtggg gggatcactt gaacttggga cgcggaggtt gcagtgagca atgatgccac |
| 49321 | tgcactccag cctgggcaat agaatgagac tctgtctcaa aaacaaacaa aaatttcttt |
| 49381 | tcctaggaac taacaaaaca ttgtgtcttt cttttgaaga ttatgtgata gaaaagctgg |
| 49441 | agcaatgcgg gttctttgac gacaacatta gaaaggacac attctttttg acggtccatg |
| 49501 | atgctatact ctatctacag aaccaagtga aatctcaaga gggtcaaggt tccattttag |
| 49561 | aaacggtaaa tattcaacct ttctacagat gtatcttttc taaactatca tgatttctat |
| 49621 | aaatggcaaa cattacacaa gtctagtcta gcbgttgaat tttaagctac ctatataact |
| 49681 | tcatggagcc tcagtttttt catcagtaaa atggaagtaa aaacattaac cttgctaggt |
| 49741 | agatatgaag actaaataag atagtttata ggaaattacc tggtagtacc cagtactgaa |
| 49801 | tagttctaca atgtgtaggt ttattaataa aagtgggcat tagctataat gccttttaag |
| 49861 | aatattgaat cttggatctt ttgtgatctg ggatttgtgt acataaattc cacttaaatt |
| 49921 | ctcagcaatc tggaaaacct tgaattataa atgtctttaa acaggatcca ccaggccata |
| 49981 | agtgatcttt gaaaaagaaa tttaaaaatc aagccacaaa gaagcccagg gttaattttt |
| 50041 | ccctacaaaa tagaataggc cctgatggga ggcctcatgg cacaacagta gcgcatctgg |
| 50101 | ctccagaata ggccctgatt tcccatgggt attattttgt taatttttct gtcaaatacc |
| 50161 | cagaagaggt gagcattctg gtctggttca ttgggcttgg cctaatggtg ctcctggtgg |
| 50221 | tacaagaatc tcatttctca tagtgaattt aggaaactaa agcaaatacc tatcaagata |
| 50281 | taataacagt aatgattcca gtgacatcgt ggatatttta aattgcttcc catttttcta |
| 50341 | aaagtagaat aagtagatcc ttattgtaga ttggcagttg attgaagaaa actaacttag |
| 50401 | gaaatgatat tatattattc tttttaggca ctggtagtgg agagattgtt ctatttgatg |
| 50461 | ttccttggta aaatactagt cctaactacc aagcbgtgga tcttaaatat aaaaaaggaa |
| 50521 | aaaaaaaaaa gagtaaagct acaaatctaa agaaaaaaaa actgtttatc attgaaaatt |
| 50581 | cataaacttt ttctatccaa cttaaaattc tctaacccat aggtgataag aaagttggat |
| 50641 | catatgaagt atcctttaag agatccacat taaaagtaaa acagaaccaa ggtatcaagt |
| 50701 | tctttctcaa catgaaagca gttattttat ttgtttatac ccattcttac taagatttta |
| 50761 | ggctatgaat gtcataaaaa ccactaacca agagtgtatc tactaggtta gactcactct |
| 50821 | tgtttgcaat cagagaggta ttgtgagtgg ctgggatgga tttttttgga ccttaaacaa |
| 50881 | atagactaag cataacggaa tgcttgtatt acatacttac tggtccacta aaagtgggtt |
| 50941 | ggacattcct ggtggcctgt gagatcaaga ggcttatatt tctgtgtctt ctcagagtct |
| 51001 | agcacaaagc tttatatgtg ataagtaggt gaatgatgat aaactccttc aagagggagt |
| 51061 | ccctctgtat caaagatatt gtgactgcaa tgacacaacc ttcttcctat ccctttattt |
| 51121 | taccatcaca ggactatctc aggacacaac ttgtagttag acttatcctc tacctttccc |
| 51181 | attatgtcat accatttgca cagggactta accctctaat tcattctcat actagctaag |
| 51241 | agaattgggc tatttgtgag ttgaaaagta gctaagtagc atttcaaaat gttattttag |
| 51301 | cctggatata tatttggagt tgctttgaaa atgtcctttt ccatgcaaaa cacaaagcca |
| 51361 | aaattgtcgt tggtttcctc tgtgtagaag attaaattac atgccacctc taaacagtag |
| 51421 | agcttttctg aataaccaac ttggtccata gacattggtt tccatctcca atagaattaa |
| 51481 | tttccaccca attccatttg tggctgtttt ttgtcatcag tgacaagctc ttcactgtgc |
| 51541 | attcattgca cactcaacgc tgtgctaagt gctcttagct tagccattga gagatgcact |
| 51601 | attgactgct gaatcattta ggcagagggg gtgacttgtt aagaggcata cactcaagag |
| 51661 | gttggggaag agagctgaaa aggagtttac acaatggaga actataccag ttcacctttc |
| 51721 | aatgtgcaaa aaaatgatat acaaaaaatt ttagttggga aatataaaag aacaatacag |
| 51781 | ctgaagagga ttctgaagta tgtaaagaca gatgagaagc accaggaaag cttcaaatca |
| 51841 | ttttcagtgg agcatcaggt gggttgatgc tattctattt ctaccctgtg ttctcttttt |
| 51901 | caagatcact ctcattcagg attgtaaaga tacccttgaa ttaatagaaa cagagctgac |
| 51961 | ggaagaagaa cttgatgtcc aggatgaggt atgatcattt tcttctgaag aaaatatttg |
| 52021 | aattacattt tgaataatta gagtaataca aatagtgaat atatctgatt aagaactgtc |
| 52081 | agggaacata attcccccaa atgcagaaaa gatggcttca tagcagggaa aaagagaaaa |
| 52141 | taagaattct cccttgaaga cattaagtac ttggggatct tttgtcccag gcatttgggg |
| 52201 | atgatcagca actggcaaga gccaacacac tgctcctgat ttgataccta cacctctgca |
| 52261 | tactgctctt ctagagatgt aaggccatgg ggtaggaaaa aaatgaatag aggaaacttc |
| 52321 | taagctagga actttataag cctcaggaat agtatgtgag gaacagaaac cctatgacct |
| 52381 | tccttcatat gactgataaa ggctttaaaa acacactctc cccaccctag actgattctg |
| 52441 | tgtatttcag atgctcttgt gacatcagac tattcctagg aaacttgtct gaacttgtag |
| 52501 | catctgagta aattttgcag cttcgccact ggataagagg tgaacactga aggaagatca |
| 52561 | cagaattgta aaaagttgaa agatttctta gaatcaagta gtctaacatt ctagcccatg |
| 52621 | cagaaatcct tcctacacca tccttgatga atgttcattc agcttttatg tgaacatttc |
| 52681 | cagacattgg ccactagcgg cttctcaagg gagtttgtta catggttgga agtctctaaa |
| 52741 | tgttacttgt gcttacagaa ctcaatttgg cctttctgta gtaaccacct agtgaactga |
| 52801 | gatctgcctt ccttagcaac acagaccttc ccactgaaca gcccttcaaa tatttgagaa |
| 52861 | tagttctcat gtctccagca gactctcttc cagttgagac tcttctagtt ccttctattc |
| 52921 | cttacaaaca agcagtcagt gcttctctgg tcacgatggg gacacaaaac cctaaatgcg |
| 52981 | gccaggccag catggagatt attcaaccat gacctacctt gatctcatca agatattcct |
| 53041 | attactacag cttaaaaatg tgtttccttt cataatagca acatcagaat tttagcttct |
| 53101 | attgagcagg ggccaactaa agactggggc attttcatac aagctatggt ctagtagagt |
| 53161 | tccctagtta tatttattta attgagcttt gaccctaata cagaactaca cctatttctg |
| 53221 | ctggatttca tcttgttggt tcttgtttac tgacataatt ttgtattatt attagtatta |
| 53281 | ttattattat tattatttgt gactgagtct tactctgtca cctggactgg agtgcagtgg |
| 53341 | tacaatctca gctcactgca atccctccct cccaggttca agagattctc acgtgtgcct |
| 53401 | cagcttccca agtagttggg attacaggcg ctcgccacca cgtccagata attttttttt |
| 53461 | tttgtattct tagtagagac agggttttgc catgttgtcc aggctggtct tgaactcctg |
| 53521 | acctcaagta atccacctgc cttgccctcc cagattgctg ggattacagg catgagccac |
| 53581 | cacattggcc agttttgtgt tttgaatcta acatccagga tattgtctac cccagtaccc |
| 53641 | gttacctggt gtcataatca aatctgataa gcctgccttc tctgcctttt tctaggtctt |
| 53701 | gaaaaaatgt tgcaaagaaa acattcaacc ccctatagtg aaatcaggca gtaaggatga |
| 53761 | caggcagaga tttctgtgga ggaaatacat tgctagagtg aaaatcacag tacctgcatc |
| 53821 | ttggcccacc agcttagtga gcccaggaaa gtcattatcg acctgagaag tccttttagc |
| 53881 | tccagtagtt tatgactcta tggatatagg gtgccttagt ttgagtaaaa actcatatgt |
| 53941 | caacattaaa acttaagact gctatattat aggatattta ttggttgcca cgtaaaataa |
| 54001 | tcattcaggg agggtttcta tagatggtaa aacaatatag cacaatagtt tcaagggcat |
| 54061 | ggactttaga acaagacaga cctgggtgct agtcctcatt ctgctactta ctggctgtgc |
| 54121 | accccagggc aaattactta tcctgtcttc atattagtat cttcatgtaa agtagtaata |
| 54181 | ataccacaga gttgtgaaaa ttaaaggata aatgtaaagt aacaagagca gtgccttgta |
| 54241 | catagtaagt gctcaataaa tagtaatcat tgctcttaaa taaatccaat taaagtgtga |
| 54301 | tgaatacagg ccaggctcag tgactcaagc ctgtaatccc agcactttgg gaggctgagg |
| 54361 | cagggggatc acttgaggtc aggagtttga gaccagcctg actaacatgg taaccccccg |
| 54421 | accatctcta ctaaaaaaaa aaaaaaaaaa attagcbggg tgtggtggca ggcacctgta |
| 54481 | atcccagcta ctcgggaggc tgaggcagga gaattgcttg aacctgggag gcagaggttg |
| 54541 | cagtgagctg agatcacgcc acagcactcc agcctgggca acagtgagtg agattcagtc |
| 54601 | tccaaaaaaa aaaaaaagta taatgaatac gaaatgaagt ttttacccta tttctattgt |
| 54661 | gatgatatac acctaagatg agtagcagta agcaatcaat actataaaaa catatttata |
| 54721 | aaaaagataa tgcagactta aggagaattc agttgtatca acactttgtt ttccccttgc |
| 54781 | ttccacaggc tatgcgtaca cttgcatcct gaaagtgggt tcgggaggtc tctatgagca |
| 54841 | aggaatacaa gacaaaactt cctcaatgca ttgactattt cttcagactc aaaacactca |
| 54901 | ttcttttttc tattaagcca ttgaaagaga agcactaaga ctgcttctag gctttattta |
| 54961 | taaaataaac accttatccc taacatgggc aaaatggcta gaattattca gacgatttgg |
| 55021 | cagcgtccag ggtaagctgg tgttataata cgctgctgat ctacatcaca gatttgctaa |
| 55081 | taatgttcac gtgggccctg gcatatctct gttcagttag agtgagtgct gacccaacag |
| 55141 | cctctgtggt caagcgagtc acgaatgatt aatcataaag aaaaatcagt ttttgactga |
| 55201 | cctggatatc catgagctgc actgatcacc atgtaaggtc acatttagta aatgctgaaa |
| 55261 | taaaatgatt aatgcattta tcaataaaag cctttgaaaa tactttggat aataaattgg |
| 55321 | agttttaaaa atgcaaattt gcttagtatc taataatgaa gtgttattac atatagccgg |
| 55381 | aattgaggat ctctttgatc ctggaaatgg tttacctaaa agctacagaa ccaggccaat |
| 55441 | atattttgaa atattgatgc agacaaatga aataataaag agattttcat ggtttataaa |
| 55501 | aatctttttt gatatgataa taatcatgat cacaactgag atcaaaaaaa tatatgacag |
| 55561 | attattttgt ttaaaaatgc agttttaatt atcttagtct atagaaatga tcattgcatg |
| 55621 | gaggcatgta taggtatgat ctgtgtaaaa tctgacataa aaacagtgct attctgagtg |
| 55681 | aaaatttttt tgatgtgctt acataaccat ggtgattaaa atgagtttat attttttctc |
| 55741 | aaaaatttta gcagtgtgta aagtaagtaa tctttaactg aactctgacc acttaaaaaa |
| 55801 | aaatctaaaa attgaactac ctatagtagt ctgtgtttaa agtgaatttt taaagacaaa |
| 55861 | gcattctaaa tgaactcaat ataaaaacat tcatttggaa tgtacatact gaaaaataca |
| 55921 | ggtttttttg accaaaagtt tttatatctt ttctttttat ttattttttt cctaagtgcc |
| 55981 | aacaattttc tagatattat atacaacaca ggctttgatc ttggggactt ttcccatata |
| 56041 | tttcacactg gagtgaatga agttgtactt catttctaga gaaaagttat acccaggtcc |
| 56101 | ccaattgaga atgtcttgct tgattgaaaa cgacatcatc ccttggtata ctccagggat |
| 56161 | tggtttcagg acccctgcat ttaccaaaat ttgtgcacac tcaagtcctg cagtcacccc |
| 56221 | tgcctaaaga tagaatggct tctctgtttt tcttctgaaa tacaaccaga aacaatgtgt |
| 56281 | ctatttctga aagaatagga ttaatgatca tacaaatggg ttaatcctga attctggttg |
| 56341 | taaatctggt tacagcataa ctaggattat aatgctgcct cattttcaca gcactacttg |
| 56401 | cttatattga caacaaatca tctcgctaaa gagtgaatgt aggccaggcg cggtggctca |
| 56461 | tgcctgtaat cccagcactt tgggaggccg aggcgggtgg atcacgaggt caggagatcg |
| 56521 | agaccatcct ggctaacatg gtaaaacccc gtctctacta aaaatagaaa aaaagaaatt |
| 56581 | agcctagcgt ggtggctggc gggcgcctgt agtcccagct atttgggagg ctaaggcagg |
| 56641 | agaatggcgt gaacccggga ggcggagctt gcagtgagcc gaggtcgtgc cactgcactc |
| 56701 | cagcctgggc gacagagcaa gactccgtct caaaaaaaaa aaaaaaaaaa aaaaaagagt |
| 56761 | gaatgtaata gtcttgcaga aaatgaatga atacctttgt tcaataaagg aaatatgcac |
| 56821 | tgctcacttt tttgaaggaa atgccaaagt tacgttttac aacaaggcta gagtttgtaa |
| 56881 | attctgggtt catttgtgat gacataagtc agcaaactgc gggaatactg tctcttctat |
| 56941 | gtattttgtg aatagtaagc ataattttag ttttgtatta tcaatgaaaa tttcacttga |
| 57001 | aattaaagct gccttttgtt atatttttaa cctataggat aagattccag tattgtatat |
| 57061 | gagttttaac aaattaaaaa atcaaatcat gtacatttga aaatatttgc acacatttaa |
| 57121 | aaataaatgt aaagttgtct tttaaactac tcggatgtgt cctttctgaa caaaa |

### Otoferlin

[0122] To date, several hundred mutations in the human OTOF gene have been identified to cause profound prelingual deafness DFNB9. Such mutations are the cause of deafness in 2-8% of people that are born with an autosomal, recessively inherited, non-syndromic deafness in different populations (Rodriguez-Ballesteros et al. (2008) Hum. Mutat. 29 823-831; Choi et al. (2009) Clinical Genetics 75 237-243; Duman et al. (2011) Genet Test Mol Biomarkers 15 29-33; Varga et al. (2006) J Med Genet 43 576-581; Iwasa et al. (2013) BMC Med. Genet. 14 95). For example, two substitutions in exon 15 at positions 490 and 515 in the conserved C2C domain of otoferlin cause DFNB9 (Mirqhomizadeh et al. (2002) Neurobiol. Dis. 10(2): 157-164). Migliosi et al. found a novel mutation Q829X in OTOF in Spanish patients with prelingual non-syndromic hearing loss (Migliosi et al. (2002) J. Med. Genet. 39(7): 502-506).

[0123] Additional exemplary mutations in a otoferlin gene detected in subjects having hearing loss and methods of sequencing a nucleic acid encoding otoferlin are described in, e.g., Rodriguez-Ballesteros et al. (2003) Hum Mutat. 22: 451-456; Wang et al. (2010) BMC Med Genet. 11:79; Yildirim-Baylan et al. (2014) hit. J. Pediatr. Otorhinolaryngol 78: 950-953; Choi et al. (2009) Clin. Genet. 75(3): 237-243; and Marlin et al. (2010) Biochem Biophys Res Commun 394: 737-742.

[0124] Otoacoustic emissions from DFNB9 patients are normal, at least for the first decade of life, indicating morphological integrity of the inner ear and proper function of outer hair cells. Apart from the lack of synaptic transmission and the subsequent loss of synapses, the morphology and physiology of the inner ear remains preserved in DFNB9, at least during the first decade in life in humans.

[0125] Studies in mouse models revealed that synapses are structurally normal, and IHCs preserve normal synapse numbers in mice within the first postnatal week. Between P6 and P15, about half of the synapses get lost (Roux et al. (2006) Cell 127 277-289). Animal models allowed studying the effect of mutations in otoferlin on synaptic transmission by recording the change in plasma membrane capacitance after vesicle fusion and the activity in the auditory nerve. In otoferlin knock-out (Otof−/−) mice, almost no exocytosis could be triggered in IHCs by depolarization induced Ca2+ influx through voltage gated Ca2+ channels (Roux et al. (2006) Cell 127 277-289). In profoundly hearing impaired pachanga (Oto^{Pga/Pga}) mice with a random point mutation in the C2F domain, short (<10 ms) depolarizations of the IHCs elicited vesicle fusion of similar size as in wild type mice, however sustained stimulations uncovered a strong deficiency in replenishing vesicles to the readily releasable pool (Pangrsic et al. (2010) Nat. Neurosci. 13 869-876). The p.Ile515Thr mutation, found in human patients with only mildly elevated hearing thresholds but a severe reduction in speech understanding and a temperature-dependent deafening (Varga et al. (2006) J Med Genet 43 576-581), uncovered an intermediate phenotype when studied in a mouse model (Strenzke et al. (2016) EMBO J. 35:2519-2535). These OtofI515T/I515T mice showed a moderate elevation of hearing thresholds when assessed by ABR with a reduction in wave I amplitude, but normal auditory thresholds in behavioral tests and recordings of single auditory nerve units. Exocytosis of the RRP is again intact, but sustained exocytosis is reduced, although not as severe as in OtofPga/Pga. While in wild type mice at room temperature, during a sustained stimulus 750 vesicles can fuse per second at each active zone, this rate drops to 350 vesicles/s/active zone in OtofI515T/I515T mice and to 200 vesicles/s/active zone in OtofPga/Pga IHCs (Pangrsic et al. (2010) Nat. Neurosci. 13 869-876; Strenzke et al. (2016) EMBO J. 35 2519-2535). This correlated with lower otoferlin protein levels at the plasma membrane of IHCs, indicating that the amount of otoferlin scales with exocytosis and hearing (Strenzke et al. (2016) EMBO J. 35 2519-2535).

[0126] Methods of detecting mutations in a gene are well-known in the art. Non-limiting examples of such techniques include: real-time polymerase chain reaction (RT-PCR), PCR, sequencing, Southern blotting, and Northern blotting.

[0127] The OTOF gene encodes otoferlin, a protein that is involved in synaptic vesicle exocytosis in cochlear hair cells (see, e.g., Johnson and Chapman (2010) J. Cell Biol. 191(1):187-198; and Heidrych et al. (2008) Hum. Mol. Genet. 17:3814-3821).

[0128] The human OTOF gene is located on chromosome 2p23.3. It contains 48 exons encompassing ˜132 kilobases (kb) (NCBI Accession No. NG009937.1). The mRNA encoding the long-form of otoferlin expressed in the brain includes 48 exons (Yasunaga et al., Am. J. Hum. Genet. 67:591-600, 2000). Forward and reverse primers that can be used to amplify each of the 48 exons in the OTOF gene are described in Table 2 of Yasunaga et al., Am. J. Hum. Genet. 67:591-600, 2000. In some examples, the full-length OTOF protein is a full-length wildtype OTOF protein. The full-length wildtype OTOF protein expressed from the human OTOF gene is 1997 residues in length.

[0129] An exemplary human wildtype otoferlin protein is or includes the sequence of any one of SEQ ID NOs: 8-12. Isoform e of human otoferlin protein (SEQ ID NO: 12) is encoded by an mRNA that includes exon 48 and does not include exon 47 of the otoferlin gene (Yasunaga et al., Am. J. Hum. Genet. 67:591-600, 2000). In some embodiments, the active otoferlin protein has the sequence of SEQ ID NO: 12, but is missing the 20 amino acids including the RXR motif identified in Strenzke et al., EMBO J. 35(23):2499-2615, 2016). Non-limiting examples of nucleic acids encoding a wildtype otoferlin protein are or include any one of SEQ ID NO: 13-17. As can be appreciated in the art, at least some or all of the codons in SEQ ID NO: 13-17 can be codon-optimized to allow for optimal expression in a non-human mammal or in a human. Orthologs of human otoferlin proteins are known in the art.

Human canonical (long) isoform sequence (otoferlin protein) (also
called otoferlin isoform a) (NCBI Accession No. AAD26117.1)
(SEQ ID NO: 8)
[sequence omitted]
Human Isoform 2 (short 1) (otoferlin protein) (also called otoferlin
isoform d) (NCBI Accession No. NP_919304.1)
(SEQ ID NO: 9)
MIKTEKSYPERRLRGVLEELSCGCCRFLSLADKDQGHSSRTRLDRERLKSCMRELENMGQQARMLRAQVKR
HTVRDKLRLCQNFLQKLRFLADEPQHSIPDIFIWMMSNNKRVAYARVPSKDLLFSIVEEETGKDCAKVKTL
FLKLPGKRGFGSAGWTVQAKVELYLWLGLSKQRKEFLCGLPCGFQEVKAAQGLGLHAFPPVSLVYTKKQAF
QLRAHMYQARSLFAADSSGLSDPFARVFFINQSQCTEVLNETLCPTWDQMLVFDNLELYGEAHELRDDPPI
IVIEIYDQDSMGKADFMGRTFAKPLVKMADEAYCPPRFPPQLEYYQIYRGNATAGDLLAAFELLQIGPAGK
ADLPPINGPVDVDRGPIMPVPMGIRPVLSKYRVEVLFWGLRDLKRVNLAQVDRPRVDIECAGKGVQSSLIH
NYKKNPNFNTLVKWFEVDLPENELLHPPLNIRVVDCRAFGRYTLVGSHAVSSLRRFIYRPPDRSAPSWNTT
GEVVVTMEPEVPIKKLETMVKLDATSEAVVKVDVAEEEKEKKKKKKGTAEEPEEEEPDESMLDWWSKYFAS
IDTMKEQLRQQEPSGIDLEEKEEVDNTEGLKGSMKGKEKARAAKEEKKKKTQSSGSGQGSEAPEKKKPKID
ELKVYPKELESEFDNFEDWLHTFNLLRGKTGDDEDGSTEEERIVGRFKGSLCVYKVPLPEDVSREAGYDST
YGMFQGIPSNDPINVLVRVYVVRATDLHPADINGKADPYIAIRLGKTDIRDKENYISKQLNPVFGKSFDIE
ASFPMESMLTVAVYDWDLVGTDDLIGETKIDLENRFYSKHRATCGIAQTYSTHGYNIWRDPMKPSQILTRL
CKDGKVDGPHFGPPGRVKVANRVFTGPSEIEDENGQRKPTDEHVALLALRHWEDIPRAGCRLVPEHVETRP
LLNPDKPGIEQGRLELWVDMFPMDMPAPGTPLDISPRKPKKYELRVIIWNTDEVVLEDDDFFTGEKSSDIF
VRGWLKGQQEDKQDTDVHYHSLTGEGNFNWRYLFPFDYLAAEEKIVISKKESMFSWDETEYKIPARLTLQI
WDADHFSADDFLGAIELDLNRFPRGAKTAKQCTMEMATGEVDVPLVSIFKQKRVKGWWPLLARNENDEFEL
TGKVEAELHLLTAEEAEKNPVGLARNEPDPLEKPNRPDTAFVWFLNPLKSIKYLICTRYKWLIIKIVLALL
GLLMLGLFLYSLPGYMVKKLLGA
Human Isoform 3 (short 2) (otoferlin protein) (also called otoferlin
isoform c) (NCBI Accession No. NP_919303.1)
(SEQ ID NO: 10)
MMTDTQDGPSESSQIMRSLTPLINREEAFGEAGEAGLWPSITHTPDSQEEGLNDIQEMIKTEKSYPERRLR
GVLEELSCGCCRFLSLADKDQGHSSRTRLDRERLKSCMRELENMGQQARMLRAQVKRHTVRDKLRLCQNFL
QKLRFLADEPQHSIPDIFIWMMSNNKRVAYARVPSKDLLFSIVEEETGKDCAKVKTLFLKLPGKRGFGSAG
WTVQAKVELYLWLGLSKQRKEFLCGLPCGFQEVKAAQGLGLHAFPPVSLVYTKKQAFQLRAHMYQARSLFA
ADSSGLSDPFARVFFINQSQCTEVLNETLCPTWDQMLVETNLELYGEAHELRDDPPIIVIEIYDQDSMGKA
DFMGRTFAKPLVKMADEAYCPPRFPPQLEYYQIYRGNATAGDLLAAFELLQIGPAGKADLPPINGPVDVDR
GPIMPVPMGIRPVLSKYRVEVLFWGLRDLKRVNLAQVDRPRVDIECAGKGVQSSLIHNYKKNPNFNTLVKW
FEVDLPENELLHPPLNIRVVDCRAFGRYTLVGSHAVSSLRRFIYRPPDRSAPSWNTTVALLARCRVLCNGG
SSSHSTGEVVVTMEPEVPIKKLETMVKLDATSEAVVKVDVAEEEKEKKKKKKGTAEEPEEEEPDESMLDWW
SKYFASIDTMKEQLRQQEPSGIDLEEKEEVDNTEGLKGSMKGKEKARAAKEEKKKKTQSSGSGQGSEAPEK
KKPKIDELKVYPKELESEFDNFEDWLHTFNLLRGKTGDDEDGSTEEERIVGRFKGSLCVYKVPLPEDVSRE
AGYDSTYGMFQGIPSNDPINVLVRVYVVRATDLHPADINGKADPYIAIRLGKTDIRDKENYISKQLNPVFG
KSFDIEASFPMESMLTVAVYDWDLVGTDDLIGETKIDLENRFYSKHRATCGIAQTYSTHGYNIWRDPMKPS
QILTRLCKDGKVDGPHFGPPGRVKVANRVFTGPSEIEDENGQRKPTDEVALLALRHWEDIPRAGCRLVPE
HVETRPLLNPDKPGIEQGRLELWVDMFPMDMPAPGTPLDISPRKPKKYELRVIIWNTDEVVLEDDDFFTGE
KSSDIFVRGWLKGQQEDKQDTDVHYHSLTGEGNFNWRYLFPFDYLAAEEKIVISKKESMFSWDETEYKIPA
RLTLQIWDADHFSADDFLGAIELDLNRFPRGAKTAKQCTMEMATGEVDVPLVSIFKQKRVKGWWPLLARNE
NDEFELTGKVEAELHLLTAEEAEKNPVGLARNEPDPLEKPNRPDTSFIWFLNPLKSARYFLWHTYRWLLLK
LLLLLLLLLLLALFLYSVPGYLVKKILGA
Human Isoform 4 (short 3) (otoferlin protein) (also called otoferlin
isoform b) (NCBI Accession No. NP_004793.2)
(SEQ ID NO: 11)
MIKTEKSYPERRLRGVLEELSCGCCRFLSLADKDQGHSSRTRLDRERLKSCMRELENMGQQARMLRAQVKR
HTVRDKLRLCQNFLQKLRFLADEPQHSIPDIFIWMMSNNKRVAYARVPSKDLLFSIVEEETGKDCAKVKTL
FLKLPGKRGFGSAGWTVQAKVELYLWLGLSKQRKEFLCGLPCGFQEVKAAQGLGLHAFPPVSLVYTKKQAF
QLRAHMYQARSLFAADSSGLSDPFARVFFINQSQCTEVLNETLCPTWDQMLVFDNLELYGEAHELRDDPPI
IVIEIYDQDSMGKADFMGRTFAKPLVKMADEAYCPPRFPPQLEYYQIYRGNATAGDLLAAFELLQIGPAGK
ADLPPINGPVDVDRGPIMPVPMGIRPVLSKYRVEVLFWGLRDLKRVNLAQVDRPRVDIECAGKGVQSSLIH
NYKKNPNFNTLVKWFEVDLPENELLHPPLNIRVVDCRAFGRYTLVGSHAVSSLRRFIYRPPDRSAPSWNTT
GEVVVTMEPEVPIKKLETMVKLDATSEAVVKVDVAEEEKEKKKKKKGTAEEPEEEEPDESMLDWWSKYFAS
IDTMKEQLRQQEPSGIDLEEKEEVDNTEGLKGSMKGKEKARAAKEEKKKKTQSSGSGQGSEAPEKKKPKID
ELKVYPKELESEFDNFEDWLHTFNLLRGKTGDDEDGSTEEERIVGRFKGSLCVYKVPLPEDVSREAGYDST
YGMFQGIPSNDPINVLVRVYVVRATDLHPADINGKADPYIAIRLGKTDIRDKENYISKQLNPVFGKSFDIE
ASFPMESMLTVAVYDWDLVGTDDLIGETKIDLENRFYSKHRATCGIAQTYSTHGYNIWRDPMKPSQILTRL
CKDGKVDGPHFGPPGRVKVANRVFTGPSEIEDENGQRKPTDEHVALLALRHWEDIPRAGCRLVPEHVETRP
LLNPDKPGIEQGRLELWVDMFPMDMPAPGTPLDISPRKPKKYELRVIIWNTDEVVLEDDDFFTGEKSSDIF
VRGWLKGQQEDKQDTDVHYHSLTGEGNFNWRYLFPFDYLAAEEKIVISKKESMFSWDETEYKIPARLTLQI
WDADHFSADDFLGAIELDLNRFPRGAKTAKQCTMEMATGEVDVPLVSIFKQKRVKGWWPLLARNENDEFEL
TGKVEAELHLLTAEEAEKNPVGLARNEPDPLEKPNRPDTSFIWFLNPLKSARYFLWHTYRWLLLKLLLLLL
LLLLLALFLYSVPGYLVKKILGA
Human Isoform 5 (short 4) (otoferlin protein) (also called otoferlin
isoform e) (NCBI Accession No. NP_001274418.1)
(SEQ ID NO: 12)
MALLIHLKTVSELRGRGDRIAKVTFRGQSFYSRVLENCEDVADFDETFRWPVASSIDRNEMLEIQVFNYSK
VFSNKLIGTFRMVLQKVVEESHVEVTDTLIDDNNAIIKTSLCVEVRYQATDGTVGSWDDGDFLGDESLQEE
EKDSQETDGLLPGSRPSSRPPGEKSFRRAGRSVFSAMKLGKNRSHKEEPQRPDEPAVLEMEDLDHLAIRLG
DGLDPDSVSLASVTALTTNVSNKRSKPDIKMEPSAGRPMDYQVSITVIEARQLVGLNMDPVVCVEVGDDKK
YTSMKESTNCPYYNEYFVFDFHVSPDVMFDKIIKISVIHSKNLLRSGTLVGSFKMDVGTVYSQPEHQFHHK
WAILSDPDDISSGLKGYVKCDVAVVGKGDNIKTPHKANETDEDDIEGNLLLPEGVPPERQWARFYVKIYRA
EGLPRMNTSLMANVKKAFIGENKDLVDPYVQVFFAGQKGKTSVQKSSYEPLWNEQVVFTDLFPPLCKRMKV
QIRDSDKVNDVAIGTHFIDLRKISNDGDKGFLPTLGPAWVNMYGSTRNYTLLDEHQDLNEGLGEGVSFRAR
LLLGLAVEIVDTSNPELTSSTEVQVEQATPISESCAGKMEEFFLFGAFLEASMIDRRNGDKPITFEVTIGN
YGNEVDGLSRPQRPRPRKEPGDEEEVDLIQNASDDEAGDAGDLASVSSTPPMRPQVTDRNYFHLPYLERKP
CIYIKSWWPDQRRRLYNANIMDHIADKLEEGLNDIQEMIKTEKSYPERRLRGVLEELSCGCCRFLSLADKD
QGHSSRTRLDRERLKSCMRELENMGQQARMLRAQVKRHTVRDKLRLCQNFLQKLRFLADEPQHSIPDIFIW
MMSNNKRVAYARVPSKDLLFSIVEEETGKDCAKVKTLFLKLPGKRGFGSAGWTVQAKVELYLWLGLSKQRK
EFLCGLPCGFQEVKAAQGLGLHAFPPVSLVYTKKQAFQLRAHMYQARSLFAADSSGLSDPFARVFFINQSQ
CTEVLNETLCPTWDQMLVFDNLELYGEAHELRDDPPIIVIEIYDQDSMGKADFMGRTFAKPLVKMADEAYC
PPRFPPQLEYYQIYRGNATAGDLLAAFELLQIGPAGKADLPPINGPVDVDRGPIMPVPMGIRPVLSKYRVE
VLFWGLRDLKRVNLAQVDRPRVDIECAGKGVQSSLIHNYKKNPNFNTLVKWFEVDLPENELLHPPLNIRVV
DCRAFGRYTLVGSHAVSSLRRFIYRPPDRSAPSWNTTVRLLRRCRVLCNGGSSSHSTGEVVVTMEPEVPIK
KLETMVKLDATSEAVVKVDVAEEEKEKKKKKKGTAEEPEEEEPDESMLDWWSKYFASIDTMKEQLRQQEPS
GIDLEEKEEVDNTEGLKGSMKGKEKARAAKEEKKKKTQSSGSGQGSEAPEKKKPKIDELKVYPKELESEFD
NFEDWLHTFNLLRGKTGDDEDGSTEEERIVGRFKGSLCVYKVPLPEDVSREAGYDSTYGMFQGIPSNDPIN
VLVRVYVVRATDLHPADINGKADPYIAIRLGKTDIRDKENYISKQLNPVFGKSFDIEASFPMESMLTVAVY
DWDLVGTDDLIGETKIDLENRFYSKHRATCGIAQTYSTHGYNIWRDPMKPSQILTRLCKDGKVDGPHFGPP
GRVKVANRVFTGPSEIEDENGQRKPTDEHVALLALRHWEDIPRAGCRLVPEHVETRPLLNPDKPGIEQGRL
ELWVDMFPMDMPAPGTPLDISPRKPKKYELRVIIWNTDEVVLEDDDFFTGEKSSDIFVRGWLKGQQEDKQD
TDVHYHSLTGEGNFNWRYLFPFDYLAAEEKIVISKKESMFSWDETEYKIPARLTLQIWDADHFSADDFLGA
IELDLNRFPRGAKTAKQCTMEMATGEVDVPLVSIFKQKRVKGWWPLLARNENDEFELTGKVEAELHLLTAE
EAEKNPVGLARNEPDPLEKPNRPDTAFVWFLNPLKSIKYLICTRYKWLIIKIVLALLGLLMLGLFLYSLPG
YMVKKLLGA
Complete cds (otoferlin cDNA) (encodes the protein of SEQ ID NO: 8)
(SEQ ID NO: 13)
atga tcaaaacgga gaagtcctac cctgagcgtc gcctgcgggg cgtcctggag gagctgagct
gtggctgctg ccgcttcctc tccctcgctg acaaggacca gggccactca tcccgcacca
ggcttgaccg ggagcgcctc aagtcctgca tgagggagct ggaaaacatg gggcagcagg
ccaggatgct gcgggcccag gtgaagcggc acacggtgcg ggacaagctg aggctgtgcc
agaacttcct gcagaagctg cgcttcctgg cggacgagcc ccagcacagc attcccgaca
tcttcatctg gatgatgagc aacaacaagc gtgtcgccta tgcccgtgtg ccctccaagg
acctgctctt ctccatcgtg gaggaggaga ctggcaagga ctgcgccaag gtcaagacgc
tcttccttaa gctgccaggg aagcggggct tcggctcggc aggctggaca gtgcaggcca
aggtggagct gtacctgtgg ctgggcctca gcaaacagcg caaggagttc ctgtgcggcc
tgccctgtgg cttccaggag gtcaaggcag cccagggcct gggcctgcat gccttcccac
ccgtcagcct ggtctacacc aagaagcagg cgttccagct ccgagcgcac atgtaccagg
cccgcagcct ctttgccgcc gacagcagcg gactctcaga cccctttgcc cgcgtcttct
tcatcaatca gagtcagtgc acagaggtgc tgaatgagac cctgtgtccc acctgggacc
agatgctggt gttcgacaac ctggagctct atggtgaagc tcatgagctg agggacgatc
cgcccatcat tgtcattgaa atctatgacc aggattccat gggcaaagct gacttcatgg
gccggacctt cgccaaaccc ctggtgaaga tggcagacga ggcgtactgc ccaccccgct
tcccacctca gctcgagtac taccagatct accgtggcaa cgccacagct ggagacccgc
tggcggcctt cgagctgctg cagattggac cagcagggaa ggctgacctg ccccccatca
atggcccggt ggacgtggac cgaggtccca tcatgcccgt gcccatgggc atccggcccg
tgctcagcaa gtaccgagtg gaggtgctgt tctggggcct acgggaccta aagcgggtga
acctggccca ggtggaccgg ccacgggtgg acatcgagtg tgcagggaag ggggtgcagt
cgtccctgat ccacaattat aagaagaacc ccaacttcaa caccctcgtc aagtggtttg
aagtggacct cccagagaac gagctgctgc acccgccctt gaacatccgt gtggtggact
gccgggcctt cggtcgctac acactggtgg gctcccatgc cgtcagctcc ctgcgacgct
tcatctaccg gcccccagac cgctcggccc ccagctggaa caccacgggg gaggttgtgg
tgactatgga gccagaggta cccatcaaga aactggagac catggtgaag ctggacgcga
cttctgaagc tgttgtcaag gtggatgtgg ctgaggagga gaaggagaag aagaagaaga
agaagggcac tgcggaggag ccagaggagg aggagccaga cgagagcatg ctggactggt
ggtccaagta ctttgcctcc attgacacca tgaaggagca acttcgacaa caagagccct
ctggaattga cttggaggag aaggaggaag tggacaatac cgagggcctg aaggggtcaa
tgaagggcaa ggagaaggca agggctgcca aagaggagaa gaagaagaaa actcagagct
ctggctctgg ccaggggtcc gaggcccccg agaagaagaa acccaagatt gatgagctta
aggtataccc caaagagctg gagtccgagt ttgataactt tgaggactgg ctgcacactt
tcaacttgct tcggggcaag accggggatg atgaggatgg ctccaccgag gaggagcgca
ttgtgggacg cttcaagggc tccctctgcg tgtacaaagt gccactccca gaggacgtgt
cccgggaagc cggctacgac tccacctacg gcatgttcca gggcatcccg agcaatgacc
ccatcaatgt gctggtccga gtctatgtgg tccgggccac ggacctgcac cctgctgaca
tcaacggcaa agctgacccc tacatcgcca tccggctagg caagactgac atccgcgaca
aggagaacta catctccaag cagctcaacc ctgtctttgg gaagtccttt gacatcgagg
cctccttccc catggaatcc atgctgacgg tggctgtgta tgactgggac ctggtgggca
ctgatgacct cattggggaa accaagatcg acctggagaa ccgcttctac agcaagcacc
gcgccacctg cggcatcgcc cagacctact ccacacatgg ctacaatatc tggcgggacc
ccatgaagcc cagccagatc ctgacccgcc tctgcaaaga cggcaaagtg gacggccccc
actttgggcc ccctgggaga gtgaaggtgg ccaaccgcgt cttcactggg ccctctgaga
ttgaggacga gaacggtcag aggaagccca cagacgagca tgtggcgctg ttggccctga
ggcactggga ggacatcccc cgcgcaggct gccgcctggt gccagagcat gtggagacga
ggccgctgct caaccccgac aagccgggca tcgagcaggg ccgcctggag ctgtgggtgg
acatgttccc catggacatg ccagcccctg ggacgcctct ggacatctca cctcggaagc
ccaagaagta cgagctgcgg gtcatcatct ggaacacaga tgaggtggtc ttggaggacg
acgacttctt cacaggggag aagtccagtg acatcttcgt gagggggtgg ctgaagggcc
agcaggagga caagcaggac acagacgtcc actaccactc cctcactggc gagggcaact
tcaactggcg ctacctgttc cccttcgact acctggcggc ggaggagaag atcgtcatct
ccaagaagga gtccatgttc tcctgggacg agaccgagta caagatcccc gcgcggctca
ccctgcagat ctgggatgcg gaccacttct ccgctgacga cttcctgggg gccatcgagc
tggacctgaa ccggttcccg cggggcgcaa agacagccaa gcagtgcacc atggagatgg
ccaccgggga ggtggacgtg cccctcgtgt ccatcttcaa gcaaaagcgc gtcaaaggct
ggtggcccct cctggcccgc aatgagaacg atgagtttga gctcacgggc aaggtggagg
ctgagctgca tttactgaca gcagaggagg cagagaagaa cccagtgggc ctggcccgca
atgaacctga ccccctagag aaacccaacc ggcccgacac gagcttcatc tggttcctga
accctctcaa gtcggctcgc tacttcttgt ggcacacgta tcgctggctg ctcctcaaac
tgttgctgct cctgctgctg ctcctcctcc tcgccctgtt cctctactct gtgcctggct
acctggtcaa gaaaatcctc ggggcctga
Human Otoferlin Transcript Variant 1 (encodes the protein of SEQ ID NO: 8)
(SEQ ID NO: 14)
atggccttgctca tccacctcaa gacagtctcg gagctgcggg gcaggggcga ccggatcgcc
aaagtgactt tccgagggca atccttctac tctcgggtcc tggagaactg tgaggatgtg
gctgactttg atgagacatt tcggtggccg gtggccagca gcatcgacag aaatgagatg
ctggagattc aggttttcaa ctacagcaaa gtcttcagca acaagctcat cgggaccttc
cgcatggtgc tgcagaaggt ggtagaggag agccatgtgg aggtgactga cacgctgatt
gatgacaaca atgctatcat caagaccagc ctgtgcgtgg aggtccggta tcaggccact
gacggcacag tgggctcctg ggacgatggg gacttcctgg gagatgagtc tcttcaagag
gaagagaagg acagccaaga gacggatgga ctgctcccag gctcccggcc cagctcccgg
cccccaggag agaagagctt ccggagagcc gggaggagcg tgttctccgc catgaagctc
ggcaaaaacc ggtctcacaa ggaggagccc caaagaccag atgaaccggc ggtgctggag
atggaagacc ttgaccatct ggccattcgg ctaggagatg gactggatcc cgactcggtg
tctctagcct cagtcacagc tctcaccact aatgtctcca acaagcgatc taagccagac
attaagatgg agccaagtgc tgggcggccc atggattacc aggtcagcat cacggtgatc
gaggcccggc agctggtggg cttgaacatg gaccctgtgg tgtgcgtgga ggtgggtgac
gacaagaagt acacatccat gaaggagtcc actaactgcc cctattacaa cgagtacttc
gtcttcgact tccatgtctc tccggatgtc atgtttgaca agatcatcaa gatttcggtg
attcactcca agaacctgct gcgcagtggc accctggtgg gctccttcaa aatggacgtg
ggaaccgtgt actcgcagcc agagcaccag ttccatcaca agtgggccat cctgtctgac
cccgatgaca tctcctcggg gctgaagggc tacgtgaagt gtgacgttgc cgtggtgggc
aaaggggaca acatcaagac gccccacaag gccaatgaga ccgacgaaga tgacattgag
gggaacttgc tgctccccga gggggtgccc cccgaacgcc agtgggcccg gttctatgtg
aaaatttacc gagcagaggg gctgccccgt atgaacacaa gcctcatggc caatgtaaag
aaggctttca tcggtgaaaa caaggacctc gtggacccct acgtgcaagt cttctttgct
ggccagaagg gcaagacttc agtgcagaag agcagctatg agcccctgtg gaatgagcag
gtcgtcttta cagacctctt ccccccactc tgcaaacgca tgaaggtgca gatccgagac
tcggacaagg tcaacgacgt ggccatcggc acccacttca ttgacctgcg caagatttct
aatgacggag acaaaggctt cctgcccaca ctgggcccag cctgggtgaa catgtacggc
tccacacgta actacacgct gctggatgag catcaggacc tgaacgaggg cctgggggag
ggtgtgtcct tccgggcccg gctcctgctg ggcctggctg tggagatcgt agacacctcc
aaccctgagc tcaccagctc cacagaggtg caggtggagc aggccacgcc catctcggag
agctgtgcag gtaaaatgga agaattcttt ctctttggag ccttcctgga ggcctcaatg
atcgaccgga gaaacggaga caagcccatc acctttgagg tcaccatagg caactatggg
aacgaagttg atggcctgtc ccggccccag cggcctcggc cccggaagga gccgggggat
gaggaagaag tagacctgat tcagaacgca agtgatgacg aggccggtga tgccggggac
ctggcctcag tctcctccac tccaccaatg cggccccagg tcaccgacag gaactacttc
catctgccct acctggagcg aaagccctgc atctacatca agagctggtg gccggaccag
cgccgccgcc tctacaatgc caacatcatg gaccacattg ccgacaagct ggaagaaggc
ctgaacgaca tacaggagat gatcaaaacg gagaagtcct accctgagcg tcgcctgcgg
ggcgtcctgg aggagctgag ctgtggctgc tgccgcttcc tctccctcgc tgacaaggac
cagggccact catcccgcac caggcttgac cgggagcgcc tcaagtcctg catgagggag
ctggaaaaca tggggcagca ggccaggatg ctgcgggccc aggtgaagcg gcacacggtg
cgggacaagc tgaggctgtg ccagaacttc ctgcagaagc tgcgcttcct ggcggacgag
ccccagcaca gcattcccga catcttcatc tggatgatga gcaacaacaa gcgtgtcgcc
tatgcccgtg tgccctccaa ggacctgctc ttctccatcg tggaggagga gactggcaag
gactgcgcca aggtcaagac gctcttcctt aagctgccag ggaagcgggg cttcggctcg
gcaggctgga cagtgcaggc caaggtggag ctgtacctgt ggctgggcct cagcaaacag
cgcaaggagt tcctgtgcgg cctgccctgt ggcttccagg aggtcaaggc agcccagggc
ctgggcctgc atgccttccc acccgtcagc ctggtctaca ccaagaagca ggcgttccag
ctccgagcgc acatgtacca ggcccgcagc ctctttgccg ccgacagcag cggactctca
gacccctttg cccgcgtctt cttcatcaat cagagtcagt gcacagaggt gctgaatgag
accctgtgtc ccacctggga ccagatgctg gtgttcgaca acctggagct ctatggtgaa
gctcatgagc tgagggacga tccgcccatc attgtcattg aaatctatga ccaggattcc
atgggcaaag ctgacttcat gggccggacc ttcgccaaac ccctggtgaa gatggcagac
gaggcgtact gcccaccccg cttcccacct cagctcgagt actaccagat ctaccgtggc
aacgccacag ctggagacct gctggcggcc ttcgagctgc tgcagattgg accagcaggg
aaggctgacc tgccccccat caatggcccg gtggacgtgg accgaggtcc catcatgccc
gtgcccatgg gcatccggcc cgtgctcagc aagtaccgag tggaggtgct gttctggggc
ctacgggacc taaagcgggt gaacctggcc caggtggacc ggccacgggt ggacatcgag
tgtgcaggga agggggtgca gtcgtccctg atccacaatt ataagaagaa ccccaacttc
aacaccctcg tcaagtggtt tgaagtggac ctcccagaga acgagctgct gcacccgccc
ttgaacatcc gtgtggtgga ctgccgggcc ttcggtcgct acacactggt gggctcccat
gccgtcagct ccctgcgacg cttcatctac cggcccccag accgctcggc ccccagctgg
aacaccacgg tcaggcttct ccggcgctgc cgtgtgctgt gcaatggggg ctcctcctct
cactccacag gggaggttgt ggtgactatg gagccagagg tacccatcaa gaaactggag
accatggtga agctggacgc gacttctgaa gctgttgtca aggtggatgt ggctgaggag
gagaaggaga agaagaagaa gaagaagggc actgcggagg agccagagga ggaggagcca
gacgagagca tgctggactg gtggtccaag tactttgcct ccattgacac catgaaggag
caacttcgac aacaagagcc ctctggaatt gacttggagg agaaggagga agtggacaat
accgagggcc tgaaggggtc aatgaagggc aaggagaagg caagggctgc caaagaggag
aagaagaaga aaactcagag ctctggctct ggccaggggt ccgaggcccc cgagaagaag
aaacccaaga ttgatgagct taaggtatac cccaaagagc tggagtccga gtttgataac
tttgaggact ggctgcacac tttcaacttg cttcggggca agaccgggga tgatgaggat
ggctccaccg aggaggagcg cattgtggga cgcttcaagg gctccctctg cgtgtacaaa
gtgccactcc cagaggacgt gtcccgggaa gccggctacg actccaccta cggcatgttc
cagggcatcc cgagcaatga ccccatcaat gtgctggtcc gagtctatgt ggtccgggcc
acggacctgc accctgctga catcaacggc aaagctgacc cctacatcgc catccggcta
ggcaagactg acatccgcga caaggagaac tacatctcca agcagctcaa ccctgtcttt
gggaagtcct ttgacatcga ggcctccttc cccatggaat ccatgctgac ggtggctgtg
tatgactggg acctggtggg cactgatgac ctcattgggg aaaccaagat cgacctggag
aaccgcttct acagcaagca ccgcgccacc tgcggcatcg cccagaccta ctccacacat
ggctacaata tctggcggga ccccatgaag cccagccaga tcctgacccg cctctgcaaa
gacggcaaag tggacggccc ccactttggg ccccctggga gagtgaaggt ggccaaccgc
gtcttcactg ggccctctga gattgaggac gagaacggtc agaggaagcc cacagacgag
catgtggcgc tgttggccct gaggcactgg gaggacatcc cccgcgcagg ctgccgcctg
gtgccagagc atgtggagac gaggccgctg ctcaaccccg acaagccggg catcgagcag
ggccgcctgg agctgtgggt ggacatgttc cccatggaca tgccagcccc tgggacgcct
ctggacatct cacctcggaa gcccaagaag tacgagctgc gggtcatcat ctggaacaca
gatgaggtgg tcttggagga cgacgacttc ttcacagggg agaagtccag tgacatcttc
gtgagggggt ggctgaaggg ccagcaggag gacaagcagg acacagacgt ccactaccac
tccctcactg gcgagggcaa cttcaactgg cgctacctgt tccccttcga ctacctggcg
gcggaggaga agatcgtcat ctccaagaag gagtccatgt tctcctggga cgagaccgag
tacaagatcc ccgcgcggct caccctgcag atctgggatg cggaccactt ctccgctgac
gacttcctgg gggccatcga gctggacctg aaccggttcc cgcggggcgc aaagacagcc
aagcagtgca ccatggagat ggccaccggg gaggtggacg tgcccctcgt gtccatcttc
aagcaaaagc gcgtcaaagg ctggtggccc ctcctggccc gcaatgagaa cgatgagttt
gagctcacgg gcaaggtgga ggctgagctg catttactga cagcagagga ggcagagaag
aacccagtgg gcctggcccg caatgaacct gaccccctag agaaacccaa ccggcccgac
acgagcttca tctggttcct gaaccctctc aagtcggctc gctacttctt gtggcacacg
tatcgctggc tgctcctcaa actgttgctg ctcctgctgc tgctcctcct cctcgccctg
ttcctctact ctgtgcctgg ctacctggtc aagaaaatcc tcggggcctg a
Human Otoferlin Transcript Variant 2 (encodes the protein of SEQ ID NO: 11)
(SEQ ID NO: 15)
atgatcaaaacgga gaagtcctac cctgagcgtc gcctgcgggg cgtcctggag gagctgagct
gtggctgctg ccgcttcctc tccctcgctg acaaggacca gggccactca tcccgcacca
ggcttgaccg ggagcgcctc aagtcctgca tgagggagct ggaaaacatg gggcagcagg
ccaggatgct gcgggcccag gtgaagcggc acacggtgcg ggacaagctg aggctgtgcc
agaacttcct gcagaagctg cgcttcctgg cggacgagcc ccagcacagc attcccgaca
tcttcatctg gatgatgagc aacaacaagc gtgtcgccta tgcccgtgtg ccctccaagg
acctgctctt ctccatcgtg gaggaggaga ctggcaagga ctgcgccaag gtcaagacgc
tcttccttaa gctgccaggg aagcggggct tcggctcggc aggctggaca gtgcaggcca
aggtggagct gtacctgtgg ctgggcctca gcaaacagcg caaggagttc ctgtgcggcc
tgccctgtgg cttccaggag gtcaaggcag cccagggcct gggcctgcat gccttcccac
ccgtcagcct ggtctacacc aagaagcagg cgttccagct ccgagcgcac atgtaccagg
cccgcagcct ctttgccgcc gacagcagcg gactctcaga cccctttgcc cgcgtcttct
tcatcaatca gagtcagtgc acagaggtgc tgaatgagac cctgtgtccc acctgggacc
agatgctggt gttcgacaac ctggagctct atggtgaagc tcatgagctg agggacgatc
cgcccatcat tgtcattgaa atctatgacc aggattccat gggcaaagct gacttcatgg
gccggacctt cgccaaaccc ctggtgaaga tggcagacga ggcgtactgc ccaccccgct
tcccacctca gctcgagtac taccagatct accgtggcaa cgccacagct ggagacctgc
tggcggcctt cgagctgctg cagattggac cagcagggaa ggctgacctg ccccccatca
atggcccggt ggacgtggac cgaggtccca tcatgcccgt gcccatgggc atccggcccg
tgctcagcaa gtaccgagtg gaggtgctgt tctggggcct acgggaccta aagcgggtga
acctggccca ggtggaccgg ccacgggtgg acatcgagtg tgcagggaag ggggtgcagt
cgtccctgat ccacaattat aagaagaacc ccaacttcaa caccctcgtc aagtggtttg
aagtggacct cccagagaac gagctgctgc acccgccctt gaacatccgt gtggtggact
gccgggcctt cggtcgctac acactggtgg gctcccatgc cgtcagctcc ctgcgacgct
tcatctaccg gcccccagac cgctcggccc ccagctggaa caccacgggg gaggttgtgg
tgactatgga gccagaggta cccatcaaga aactggagac catggtgaag ctggacgcga
cttctgaagc tgttgtcaag gtggatgtgg ctgaggagga gaaggagaag aagaagaaga
agaagggcac tgcggaggag ccagaggagg aggagccaga cgagagcatg ctggactggt
ggtccaagta ctttgcctcc attgacacca tgaaggagca acttcgacaa caagagccct
ctggaattga cttggaggag aaggaggaag tggacaatac cgagggcctg aaggggtcaa
tgaagggcaa ggagaaggca agggctgcca aagaggagaa gaagaagaaa actcagagct
ctggctctgg ccaggggtcc gaggcccccg agaagaagaa acccaagatt gatgagctta
aggtataccc caaagagctg gagtccgagt ttgataactt tgaggactgg ctgcacactt
tcaacttgct tcggggcaag accggggatg atgaggatgg ctccaccgag gaggagcgca
ttgtgggacg cttcaagggc tccctctgcg tgtacaaagt gccactccca gaggacgtgt
cccgggaagc cggctacgac tccacctacg gcatgttcca gggcatcccg agcaatgacc
ccatcaatgt gctggtccga gtctatgtgg tccgggccac ggacctgcac cctgctgaca
tcaacggcaa agctgacccc tacatcgcca tccggctagg caagactgac atccgcgaca
aggagaacta catctccaag cagctcaacc ctgtctttgg gaagtccttt gacatcgagg
cctccttccc catggaatcc atgctgacgg tggctgtgta tgactgggac ctggtgggca
ctgatgacct cattggggaa accaagatcg acctggagaa ccgcttctac agcaagcacc
gcgccacctg cggcatcgcc cagacctact ccacacatgg ctacaatatc tggcgggacc
ccatgaagcc cagccagatc ctgacccgcc tctgcaaaga cggcaaagtg gacggccccc
actttgggcc ccctgggaga gtgaaggtgg ccaaccgcgt cttcactggg ccctctgaga
ttgaggacga gaacggtcag aggaagccca cagacgagca tgtggcgctg ttggccctga
ggcactggga ggacatcccc cgcgcaggct gccgcctggt gccagagcat gtggagacga
ggccgctgct caaccccgac aagccgggca tcgagcaggg ccgcctggag ctgtgggtgg
acatgttccc catggacatg ccagcccctg ggacgcctct ggacatctca cctcggaagc
ccaagaagta cgagctgcgg gtcatcatct ggaacacaga tgaggtggtc ttggaggacg
acgacttctt cacaggggag aagtccagtg acatcttcgt gagggggtgg ctgaagggcc
agcaggagga caagcaggac acagacgtcc actaccactc cctcactggc gagggcaact
tcaactggcg ctacctgttc cccttcgact acctggcggc ggaggagaag atcgtcatct
ccaagaagga gtccatgttc tcctgggacg agaccgagta caagatcccc gcgcggctca
ccctgcagat ctgggatgcg gaccacttct ccgctgacga cttcctgggg gccatcgagc
tggacctgaa ccggttcccg cggggcgcaa agacagccaa gcagtgcacc atggagatgg
ccaccgggga ggtggacgtg cccctcgtgt ccatcttcaa gcaaaagcgc gtcaaaggct
ggtggcccct cctggcccgc aatgagaacg atgagtttga gctcacgggc aaggtggagg
ctgagctgca tttactgaca gcagaggagg cagagaagaa cccagtgggc ctggcccgca
atgaacctga ccccctagag aaacccaacc ggcccgacac gagcttcatc tggttcctga
accctctcaa gtcggctcgc tacttcttgt ggcacacgta tcgctggctg ctcctcaaac
tgttgctgct cctgctgctg ctcctcctcc tcgccctgtt cctctactct gtgcctggct
acctggtcaa gaaaatcctc ggggcctga
Human Otoferlin Transcript Variant 3 (encodes the protein of SEQ ID NO: 8)
(SEQ ID NO: 16)
atgatgaccga tactcaggat ggccctagcg agagctccca gatcatgagg tccctcactc
ccctgatcaa cagggaggag gcatttgggg aggctgggga ggcggggctg tggcccagca
tcacccacac tcctgattca caggaagaag gcctgaacga catacaggag atgatcaaaa
cggagaagtc ctaccctgag cgtcgcctgc ggggcgtcct ggaggagctg agctgtggct
gctgccgctt cctctccctc gctgacaagg accagggcca ctcatcccgc accaggcttg
accgggagcg cctcaagtcc tgcatgaggg agctggaaaa catggggcag caggccagga
tgctgcgggc ccaggtgaag cggcacacgg tgcgggacaa gctgaggctg tgccagaact
tcctgcagaa gctgcgcttc ctggcggacg agccccagca cagcattccc gacatcttca
tctggatgat gagcaacaac aagcgtgtcg cctatgcccg tgtgccctcc aaggacctgc
tcttctccat cgtggaggag gagactggca aggactgcgc caaggtcaag acgctcttcc
ttaagctgcc agggaagcgg ggcttcggct cggcaggctg gacagtgcag gccaaggtgg
agctgtacct gtggctgggc ctcagcaaac agcgcaagga gttcctgtgc ggcctgccct
gtggcttcca ggaggtcaag gcagcccagg gcctgggcct gcatgccttc ccacccgtca
gcctggtcta caccaagaag caggcgttcc agctccgagc gcacatgtac caggcccgca
gcctctttgc cgccgacagc agcggactct cagacccctt tgcccgcgtc ttcttcatca
atcagagtca gtgcacagag gtgctgaatg agaccctgtg tcccacctgg gaccagatgc
tggtgttcga caacctggag ctctatggtg aagctcatga gctgagggac gatccgccca
tcattgtcat tgaaatctat gaccaggatt ccatgggcaa agctgacttc atgggccgga
ccttcgccaa acccctggtg aagatggcag acgaggcgta ctgcccaccc cgcttcccac
ctcagctcga gtactaccag atctaccgtg gcaacgccac agctggagac ctgctggcgg
ccttcgagct gctgcagatt ggaccagcag ggaaggctga cctgcccccc atcaatggcc
cggtggacgt ggaccgaggt cccatcatgc ccgtgcccat gggcatccgg cccgtgctca
gcaagtaccg agtggaggtg ctgttctggg gcctacggga cctaaagcgg gtgaacctgg
cccaggtgga ccggccacgg gtggacatcg agtgtgcagg gaagggggtg cagtcgtccc
tgatccacaa ttataagaag aaccccaact tcaacaccct cgtcaagtgg tttgaagtgg
acctcccaga gaacgagctg ctgcacccgc ccttgaacat ccgtgtggtg gactgccggg
ccttcggtcg ctacacactg gtgggctccc atgccgtcag ctccctgcga cgcttcatct
accggccccc agaccgctcg gcccccagct ggaacaccac ggtcaggctt ctccggcgct
gccgtgtgct gtgcaatggg ggctcctcct ctcactccac aggggaggtt gtggtgacta
tggagccaga ggtacccatc aagaaactgg agaccatggt gaagctggac gcgacttctg
aagctgttgt caaggtggat gtggctgagg aggagaagga gaagaagaag aagaagaagg
gcactgcgga ggagccagag gaggaggagc cagacgagag catgctggac tggtggtcca
agtactttgc ctccattgac accatgaagg agcaacttcg acaacaagag ccctctggaa
ttgacttgga ggagaaggag gaagtggaca ataccgaggg cctgaagggg tcaatgaagg
gcaaggagaa ggcaagggct gccaaagagg agaagaagaa gaaaactcag agctctggct
ctggccaggg gtccgaggcc cccgagaaga agaaacccaa gattgatgag cttaaggtat
accccaaaga gctggagtcc gagtttgata actttgagga ctggctgcac actttcaact
tgcttcgggg caagaccggg gatgatgagg atggctccac cgaggaggag cgcattgtgg
gacgcttcaa gggctccctc tgcgtgtaca aagtgccact cccagaggac gtgtcccggg
aagccggcta cgactccacc tacggcatgt tccagggcat cccgagcaat gaccccatca
atgtgctggt ccgagtctat gtggtccggg ccacggacct gcaccctgct gacatcaacg
gcaaagctga cccctacatc gccatccggc taggcaagac tgacatccgc gacaaggaga
actacatctc caagcagctc aaccctgtct ttgggaagtc ctttgacatc gaggcctcct
tccccatgga atccatgctg acggtggctg tgtatgactg ggacctggtg ggcactgatg
acctcattgg ggaaaccaag atcgacctgg agaaccgctt ctacagcaag caccgcgcca
cctgcggcat cgcccagacc tactccacac atggctacaa tatctggcgg gaccccatga
agcccagcca gatcctgacc cgcctctgca aagacggcaa agtggacggc ccccactttg
ggccccctgg gagagtgaag gtggccaacc gcgtcttcac tgggccctct gagattgagg
acgagaacgg tcagaggaag cccacagacg agcatgtggc gctgttggcc ctgaggcact
gggaggacat cccccgcgca ggctgccgcc tggtgccaga gcatgtggag acgaggccgc
tgctcaaccc cgacaagccg ggcatcgagc agggccgcct ggagctgtgg gtggacatgt
tccccatgga catgccagcc cctgggacgc ctctggacat ctcacctcgg aagcccaaga
agtacgagct gcgggtcatc atctggaaca cagatgaggt ggtcttggag gacgacgact
tcttcacagg ggagaagtcc agtgacatct tcgtgagggg gtggctgaag ggccagcagg
aggacaagca ggacacagac gtccactacc actccctcac tggcgagggc aacttcaact
ggcgctacct gttccccttc gactacctgg cggcggagga gaagatcgtc atctccaaga
aggagtccat gttctcctgg gacgagaccg agtacaagat ccccgcgcgg ctcaccctgc
agatctggga tgcggaccac ttctccgctg acgacttcct gggggccatc gagctggacc
tgaaccggtt cccgcggggc gcaaagacag ccaagcagtg caccatggag atggccaccg
gggaggtgga cgtgcccctc gtgtccatct tcaagcaaaa gcgcgtcaaa ggctggtggc
ccctcctggc ccgcaatgag aacgatgagt ttgagctcac gggcaaggtg gaggctgagc
tgcatttact gacagcagag gaggcagaga agaacccagt gggcctggcc cgcaatgaac
ctgaccccct agagaaaccc aaccggcccg acacgagctt catctggttc ctgaaccctc
tcaagtcggc tcgctacttc ttgtggcaca cgtatcgctg gctgctcctc aaactgttgc
tgctcctgct gctgctcctc ctcctcgccc tgttcctcta ctctgtgcct ggctacctgg
tcaagaaaat cctcggggcc tga
Human Otoferlin Transcript Variant 4 (encodes the protein of SEQ ID NO: 9)
(SEQ ID NO: 17)
atga tcaaaacgga gaagtcctac cctgagcgtc gcctgcgggg cgtcctggag gagctgagct
gtggctgctg ccgcttcctc tccctcgctg acaaggacca gggccactca tcccgcacca
ggcttgaccg ggagcgcctc aagtcctgca tgagggagct ggaaaacatg gggcagcagg
ccaggatgct gcgggcccag gtgaagcggc acacggtgcg ggacaagctg aggctgtgcc
agaacttcct gcagaagctg cgcttcctgg cggacgagcc ccagcacagc attcccgaca
tcttcatctg gatgatgagc aacaacaagc gtgtcgccta tgcccgtgtg ccctccaagg
acctgctctt ctccatcgtg gaggaggaga ctggcaagga ctgcgccaag gtcaagacgc
tcttccttaa gctgccaggg aagcggggct tcggctcggc aggctggaca gtgcaggcca
aggtggagct gtacctgtgg ctgggcctca gcaaacagcg caaggagttc ctgtgcggcc
tgccctgtgg cttccaggag gtcaaggcag cccagggcct gggcctgcat gccttcccac
ccgtcagcct ggtctacacc aagaagcagg cgttccagct ccgagcgcac atgtaccagg
cccgcagcct ctttgccgcc gacagcagcg gactctcaga cccctttgcc cgcgtcttct
tcatcaatca gagtcagtgc acagaggtgc tgaatgagac cctgtgtccc acctgggacc
agatgctggt gttcgacaac ctggagctct atggtgaagc tcatgagctg agggacgatc
cgcccatcat tgtcattgaa atctatgacc aggattccat gggcaaagct gacttcatgg
gccggacctt cgccaaaccc ctggtgaaga tggcagacga ggcgtactgc ccaccccgct
tcccacctca gctcgagtac taccagatct accgtggcaa cgccacagct ggagacctgc
tggcggcctt cgagctgctg cagattggac cagcagggaa ggctgacctg ccccccatca
atggcccggt ggacgtggac cgaggtccca tcatgcccgt gcccatgggc atccggcccg
tgctcagcaa gtaccgagtg gaggtgctgt tctggggcct acgggaccta aagcgggtga
acctggccca ggtggaccgg ccacgggtgg acatcgagtg tgcagggaag ggggtgcagt
cgtccctgat ccacaattat aagaagaacc ccaacttcaa caccctcgtc aagtggtttg
aagtggacct cccagagaac gagctgctgc acccgccctt gaacatccgt gtggtggact
gccgggcctt cggtcgctac acactggtgg gctcccatgc cgtcagctcc ctgcgacgct
tcatctaccg gcccccagac cgctcggccc ccagctggaa caccacgggg gaggttgtgg
tgactatgga gccagaggta cccatcaaga aactggagac catggtgaag ctggacgcga
cttctgaagc tgttgtcaag gtggatgtgg ctgaggagga gaaggagaag aagaagaaga
agaagggcac tgcggaggag ccagaggagg aggagccaga cgagagcatg ctggactggt
ggtccaagta ctttgcctcc attgacacca tgaaggagca acttcgacaa caagagccct
ctggaattga cttggaggag aaggaggaag tggacaatac cgagggcctg aaggggtcaa
tgaagggcaa ggagaaggca agggctgcca aagaggagaa gaagaagaaa actcagagct
ctggctctgg ccaggggtcc gaggcccccg agaagaagaa acccaagatt gatgagctta
aggtataccc caaagagctg gagtccgagt ttgataactt tgaggactgg ctgcacactt
tcaacttgct tcggggcaag accggggatg atgaggatgg ctccaccgag gaggagcgca
ttgtgggacg cttcaagggc tccctctgcg tgtacaaagt gccactccca gaggacgtgt
cccgggaagc cggctacgac tccacctacg gcatgttcca gggcatcccg agcaatgacc
ccatcaatgt gctggtccga gtctatgtgg tccgggccac ggacctgcac cctgctgaca
tcaacggcaa agctgacccc tacatcgcca tccggctagg caagactgac atccgcgaca
aggagaacta catctccaag cagctcaacc ctgtctttgg gaagtccttt gacatcgagg
cctccttccc catggaatcc atgctgacgg tggctgtgta tgactgggac ctggtgggca
ctgatgacct cattggggaa accaagatcg acctggagaa ccgcttctac agcaagcacc
gcgccacctg cggcatcgcc cagacctact ccacacatgg ctacaatatc tggcgggacc
ccatgaagcc cagccagatc ctgacccgcc tctgcaaaga cggcaaagtg gacggccccc
actttgggcc ccctgggaga gtgaaggtgg ccaaccgcgt cttcactggg ccctctgaga
ttgaggacga gaacggtcag aggaagccca cagacgagca tgtggcgctg ttggccctga
ggcactggga ggacatcccc cgcgcaggct gccgcctggt gccagagcat gtggagacga
ggccgctgct caaccccgac aagccgggca tcgagcaggg ccgcctggag ctgtgggtgg
acatgttccc catggacatg ccagcccctg ggacgcctct ggacatctca cctcggaagc
ccaagaagta cgagctgcgg gtcatcatct ggaacacaga tgaggtggtc ttggaggacg
acgacttctt cacaggggag aagtccagtg acatcttcgt gagggggtgg ctgaagggcc
agcaggagga caagcaggac acagacgtcc actaccactc cctcactggc gagggcaact
tcaactggcg ctacctgttc cccttcgact acctggcggc ggaggagaag atcgtcatct
ccaagaagga cctggcccgc aatgagaacg atgagtttga gctcacgggc aaggtggagg
ctgagctgca tttactgaca gcagaggagg cagagaagaa cccagtgggc ctggcccgca
atgaacctga ccccctagag aaacccaacc ggcccgacac ggccttcgtc tggttcctca
accctctcaa gtccatcaag tacctcatct gcacccggta caagtggctc atcatcaaga
tcgtgctggc gctgttgggg ctgctcatgt tggggctctt cctctacagc ctccctggct
acatggtcaa aaagctcctt ggggcatga
Human Otoferlin Transcript Variant 5 (encodes the protein of SEQ ID NO: 12)
(SEQ ID NO: 18)
atg gccttgctca tccacctcaa gacagtctcg gagctgcggg gcaggggcga ccggatcgcc
aaagtgactt tccgagggca atccttctac tctcgggtcc tggagaactg tgaggatgtg
gctgactttg atgagacatt tcggtggccg gtggccagca gcatcgacag aaatgagatg
ctggagattc aggttttcaa ctacagcaaa gtcttcagca acaagctcat cgggaccttc
cgcatggtgc tgcagaaggt ggtagaggag agccatgtgg aggtgactga cacgctgatt
gatgacaaca atgctatcat caagaccagc ctgtgcgtgg aggtccggta tcaggccact
gacggcacag tgggctcctg ggacgatggg gacttcctgg gagatgagtc tcttcaagag
gaagagaagg acagccaaga gacggatgga ctgctcccag gctcccggcc cagctcccgg
cccccaggag agaagagctt ccggagagcc gggaggagcg tgttctccgc catgaagctc
ggcaaaaacc ggtctcacaa ggaggagccc caaagaccag atgaaccggc ggtgctggag
atggaagacc ttgaccatct ggccattcgg ctaggagatg gactggatcc cgactcggtg
tctctagcct cagtcacagc tctcaccact aatgtctcca acaagcgatc taagccagac
attaagatgg agccaagtgc tgggcggccc atggattacc aggtcagcat cacggtgatc
gaggcccggc agctggtggg cttgaacatg gaccctgtgg tgtgcttgga ggtgggtgac
gacaagaagt acacatccat gaaggagtcc actaactgcc cctattacaa cgagtacttc
gtcttcgact tccatgtctc tccggatgtc atgtttgaca agatcatcaa gatttcggtg
attcactcca agaacctgct gcgcagtggc accctggtgg gctccttcaa aatggacgtg
ggaaccgtgt actcgcagcc agagcaccag ttccatcaca agtgggccat cctgtctgac
cccgatgaca tctcctcggg gctgaagggc tacgtgaagt gtgacgttgc cgtggtgggc
aaaggggaca acatcaagac gccccacaag gccaatgaga ccgacgaaga tgacattgag
gggaacttgc tgctccccga gggggtgccc cccgaacgcc agtgggcccg gttctatgtg
aaaatttacc gagcagaggg gctgccccgt atgaacacaa gcctcatggc caatgtaaag
aaggctttca tcggtgaaaa caaggacctc gtggacccct acgtgcaagt cttctttgct
ggccagaagg gcaagacttc agtgcagaag agcagctatg agcccctgtg gaatgagcag
gtcgtcttta cagacctctt ccccccactc tgcaaacgca tgaaggtgca gatccgagac
tcggacaagg tcaacgacgt ggccatcggc acccacttca ttgacctgcg caagatttct
aatgacggag acaaaggctt cctgcccaca ctgggcccag cctgggtgaa catgtacggc
tccacacgta actacacgct gctggatgag catcaggacc tgaacgaggg cctgggggag
ggtgtgtcct tccgggcccg gctcctgctg ggcctggctg tggagatcgt agacacctcc
aaccctgagc tcaccagctc cacagaggtg caggtggagc aggccacgcc catctcggag
agctgtgcag gtaaaatgga agaattcttt ctctttggag ccttcctgga ggcctcaatg
atcgaccgga gaaacggaga caagcccatc acctttgagg tcaccatagg caactatggg
aacgaagttg atggcctgtc ccggccccag cggcctcggc cccggaagga gccgggggat
gaggaagaag tagacctgat tcagaacgca agtgatgacg aggccggtga tgccggggac
ctggcctcag tctcctccac tccaccaatg cggccccagg tcaccgacag gaactacttc
catctgccct acctggagcg aaagccctgc atctacatca agagctggtg gccggaccag
cgccgccgcc tctacaatgc caacatcatg gaccacattg ccgacaagct ggaagaaggc
ctgaacgaca tacaggagat gatcaaaacg gagaagtcct accctgagcg tcgcctgcgg
ggcgtcctgg aggagctgag ctgtggctgc tgccgcttcc tctccctcgc tgacaaggac
cagggccact catcccgcac caggcttgac cgggagcgcc tcaagtcctg catgagggag
ctggaaaaca tggggcagca ggccaggatg ctgcgggccc aggtgaagcg gcacacggtg
cgggacaagc tgaggctgtg ccagaacttc ctgcagaagc tgcgcttcct ggcggacgag
ccccagcaca gcattcccga catcttcatc tggatgatga gcaacaacaa gcgtgtcgcc
tatgcccgtg tgccctccaa ggacctgctc ttctccatcg tggaggagga gactggcaag
gactgcgcca aggtcaagac gctcttcctt aagctgccag ggaagcgggg cttcggctcg
gcaggctgga cagtgcaggc caaggtggag ctgtacctgt ggctgggcct cagcaaacag
cgcaaggagt tcctgtgcgg cctgccctgt ggcttccagg aggtcaaggc agcccagggc
ctgggcctgc atgccttccc acccgtcagc ctggtctaca ccaagaagca ggcgttccag
ctccgagcgc acatgtacca ggcccgcagc ctctttgccg ccgacagcag cggactctca
gacccctttg cccgcgtctt cttcatcaat cagagtcagt gcacagaggt gctgaatgag
accctgtgtc ccacctggga ccagatgctg gtgttcgaca acctggagct ctatggtgaa
gctcatgagc tgagggacga tccgcccatc attgtcattg aaatctatga ccaggattcc
atgggcaaag ctgacttcat gggccggacc ttcgccaaac ccctggtgaa gatggcagac
gaggcgtact gcccaccccg cttcccacct cagctcgagt actaccagat ctaccgtggc
aacgccacag ctggagacct gctggcggcc ttcgagctgc tgcagattgg accagcaggg
aaggctgacc tgccccccat caatggcccg gtggacgtgg accgaggtcc catcatgccc
gtgcccatgg gcatccggcc cgtgctcagc aagtaccgag tggaggtgct gttctggggc
ctacgggacc taaagcgggt gaacctggcc caggtggacc ggccacgggt ggacatcgag
tgtgcaggga agggggtgca gtcttccctg atccacaatt ataagaagaa ccccaacttc
aacaccctcg tcaagtggtt tgaagtggac ctcccagaga acgagctgct gcacccgccc
ttgaacatcc gtgtggtgga ctgccgggcc ttcggtcgct acacactggt gggctcccat
gccgtcagct ccctgcgacg cttcatctac cggcccccag accgctcggc ccccagctgg
aacaccacgg tcaggcttct ccggcgctgc cgtgtgctgt gcaatggggg ctcctcctct
cactccacag gggaggttgt ggtgactatg gagccagagg tacccatcaa gaaactggag
accatggtga agctggacgc gacttctgaa gctgttgtca aggtggatgt ggctgaggag
gagaaggaga agaagaagaa gaagaagggc actgcggagg agccagagga ggaggagcca
gacgagagca tgctggactg gtggtccaag tactttgcct ccattgacac catgaaggag
caacttcgac aacaagagcc ctctggaatt gacttggagg agaaggagga agtggacaat
accgagggcc tgaaggggtc aatgaagggc aaggagaagg caagggctgc caaagaggag
aagaagaaga aaactcagag ctctggctct ggccaggggt ccgaggcccc cgagaagaag
aaacccaaga ttgatgagct taaggtatac cccaaagagc tggagtccga gtttgataac
tttgaggact ggctgcacac tttcaacttg cttcggggca agaccgggga tgatgaggat
ggctccaccg aggaggagcg cattgtggga cgcttcaagg gctccctctg cgtgtacaaa
gtgccactcc cagaggacgt gtcccgggaa gccggctacg actccaccta cggcatgttc
cagggcatcc cgagcaatga ccccatcaat gtgctggtcc gagtctatgt ggtccgggcc
acggacctgc accctgctga catcaacggc aaagctgacc cctacatcgc catccggcta
ggcaagactg acatccgcga caaggagaac tacatctcca agcagctcaa ccctgtcttt
gggaagtcct ttgacatcga ggcctccttc cccatggaat ccatgctgac ggtggctgtg
tatgactggg acctggtggg cactgatgac ctcattgggg aaaccaagat cgacctggag
aaccgcttct acagcaagca ccgcgccacc tgcggcatcg cccagaccta ctccacacat
ggctacaata tctggcggga ccccatgaag cccagccaga tcctgacccg cctctgcaaa
gacggcaaag tggacggccc ccactttggg ccccctggga gagtgaaggt ggccaaccgc
gtcttcactg ggccctctga gattgaggac gagaacggtc agaggaagcc cacagacgag
catgtggcgc tgttggccct gaggcactgg gaggacatcc cccgcgcagg ctgccgcctg
gtgccagagc atgtggagac gaggccgctg ctcaaccccg acaagccggg catcgagcag
ggccgcctgg agctgtgggt ggacatgttc cccatggaca tgccagcccc tgggacgcct
ctggacatct cacctcggaa gcccaagaag tacgagctgc gggtcatcat ctggaacaca
gatgaggtgg tcttggagga cgacgacttc ttcacagggg agaagtccag tgacatcttc
gtgagggggt ggctgaaggg ccagcaggag gacaagcagg acacagacgt ccactaccac
tccctcactg gcgagggcaa cttcaactgg cgctacctgt tccccttcga ctacctggcg
gcggaggaga agatcgtcat ctccaagaag gagtccatgt tctcctggga cgagaccgag
tacaagatcc ccgcgcggct caccctgcag atctgggatg cggaccactt ctccgctgac
gacttcctgg gggccatcga gctggacctg aaccggttcc cgcggggcgc aaagacagcc
aagcagtgca ccatggagat ggccaccggg gaggtggacg tgcccctcgt gtccatcttc
aagcaaaagc gcgtcaaagg ctggtggccc ctcctggccc gcaatgagaa cgatgagttt
gagctcacgg gcaaggtgga ggctgagctg catttactga cagcagagga ggcagagaag
aacccagtgg gcctggcccg caatgaacct gaccccctag agaaacccaa ccggcccgac
acggccttcg tctggttcct caaccctctc aagtccatca agtacctcat ctgcacccgg
tacaagtggc tcatcatcaa gatcgtgctg gcgctgttgg ggctgctcat gttggggctc
ttcctctaca gcctccctgg ctacatggtc aaaaagctcc ttggggcatg a

[0130] A non-limiting example of a human wildtype otoferlin genomic DNA sequence is SEQ ID NO: 19. The exons in SEQ ID NO: 19 are: nucleotide positions 5001-5206 (exon 1), nucleotide positions 25925-25983 (exon 2), nucleotide positions 35779-35867 (exon 3), nucleotide positions 44590-44689 (exon 4), nucleotide positions 47100-47281 (exon 5), nucleotide positions 59854-59927 (exon 6), nucleotide positions 61273-61399 (exon 7), nucleotide positions 61891-61945 (exon 8), nucleotide positions 68626-68757 (exon 9), nucleotide positions 73959-74021 (exon 10), nucleotide positions 74404-74488 (exon 11), nucleotide positions 79066-79225 (exon 12), nucleotide positions 80051-80237 (exon 13), nucleotide positions 81107-81293 (exon 14), nucleotide positions 82690-82913 (exon 15), nucleotide positions 83388-83496 (exon 16), nucleotide positions 84046-84226 (exon 17), nucleotide positions 84315-84435 (exon 18), nucleotide positions 85950-86050 (exon 19), nucleotide positions 86193-86283 (exon 20), nucleotide positions 86411-86527 (exon 21), nucleotide positions 86656-86808 (exon 22), nucleotide positions 87382-87571 (exon 23), nucleotide positions 87661-87785 (exon 24), nucleotide positions 88206-88340 (exon 25), nucleotide positions 89025-89186 (exon 26), nucleotide positions 89589-89708 (exon 27), nucleotide positions 90132-90293 (exon 28), nucleotide positions 90405-90567 (exon 29), nucleotide positions 91050-91180 (exon 30), nucleotide positions 92549-92578 (exon 31), nucleotide positions 92978-93106 (exon 32), nucleotide positions 95225-95291 (exon 33), nucleotide positions 96198-96334 (exon 34), nucleotide positions 96466-96600 (exon 35), nucleotide positions 96848-96985 (exon 36), nucleotide positions 97623-97750 (exon 37), nucleotide positions 97857-98027 (exon 38), nucleotide positions 98670-98830 (exon 39), nucleotide positions 99593-99735 (exon 40), nucleotide positions 100128-100216 (exon 41), nucleotide positions 101518-101616 (exon 42), nucleotide positions 101762-102003 (exon 43), nucleotide positions 102669-102847 (exon 44), nucleotide positions 102952-103052 (exon 45), nucleotide positions 103494-103691 (exon 46), nucleotide positions 105479-106496 (exon 47), and exon 48 (the sequence starting with CCGGCCCGAC (SEQ ID NO: 89); see also the description of this exon in Yasunaga et al., Am. J. Hum. Genet. 67:591-600, 2000).

[0131] The introns are located between each contiguous pair of exons in SEQ ID NO: 19, i.e., at nucleotide positions 100-5001 (intron 1), nucleotide 5207-25924 (intron 2), nucleotide positions 25984-35778 (intron 3), nucleotide positions 35868-44589 (intron 4), nucleotide positions 44690-47099 (intron 5), nucleotide positions 47282-59853 (intron 6), nucleotide positions 59928-61272 (intron 7), nucleotide positions 61400-61890 (intron 8), nucleotide positions 61946-68625 (intron 9), nucleotide positions 68758-73958 (intron 10), nucleotide positions 74022-74403 (intron 11), nucleotide positions 74489-79065 (intron 12), nucleotide positions 79226-80050 (intron 13), nucleotide positions 80238-81106 (intron 14), nucleotide positions 81294-82689 (intron 15), nucleotide positions 82914-83387 (intron 16), nucleotide positions 83497-84045 (intron 17), nucleotide positions 84227-84314 (intron 18), nucleotide positions 84436-85949 (intron 19), nucleotide positions 86051-86192 (intron 20), nucleotide positions 86284-86410 (intron 21), nucleotide positions 86528-86655 (intron 22), nucleotide positions 86809-87381 (intron 23), nucleotide positions 87572-87660 (intron 24), nucleotide positions 87786-88205 (intron 25), nucleotide positions 88341-89024 (intron 26), nucleotide positions 89187-89588 (intron 27), nucleotide positions 89709-90131 (intron 28), nucleotide positions 90294-90404 (intron 29), nucleotide positions 90568-91049 (intron 30), nucleotide positions 91181-92548 (intron 31), nucleotide positions 92579-92977 (intron 32), nucleotide positions 93107-95224 (intron 33), nucleotide positions 95292-96197 (intron 34), nucleotide positions 96335-96465 (intron 35), nucleotide positions 96601-96847 (intron 36), nucleotide positions 96986-97622 (intron 37), nucleotide positions 97751-97856 (intron 38), nucleotide positions 98028-98669 (intron 39), nucleotide positions 98831-99592 (intron 40), nucleotide positions 99736-100127 (intron 41), nucleotide positions 100217-101517 (intron 42), nucleotide positions 101617-101761 (intron 43), nucleotide positions 102004-102668 (intron 44), nucleotide positions 102848-102951 (intron 45), nucleotide positions 103053-103494 (intron 46), nucleotide positions 103692-105478 (intron 47), and nucleotide positions 106497-108496 (intron 48).

| Human Otoferlin Gene Sequence (NCBI Accession No. NG_009937.1) | |
|---|---|
| (SEQ ID NO: 19) | |
| 1 | gggagagcat gcgggctttt tcacccattt ggagactctg cctgcagaat cctcaagaca |
| 61 | ttcatttcat tcattcgttc actctttttt tcagacaagg gttcttagga tcattcattc |
| 121 | attctataca gatttgctga tactgtacag gttgcctctc agaatccagt gcctgttctc |
| 181 | agtacctatg ctgactggta ggagggataa agacagcctt acaccctggg agaggcggtc |
| 241 | cagagtagaa acatcagaca ctgtaggaga aagagccaaa gaacaggagg caacagccag |
| 301 | acttgcatgt tagatggttg gagtctgaaa atatccagag taaagaaagg taggtgtaac |
| 361 | ctagtatttg aaagtgctaa acagcaagcc agcgctcagg gcaagtggcc aggaagcttt |
| 421 | ccaagaaaaa cttctgggag gataaaggga ggtctgtgaa aggaccgacc gcaaagtcgg |
| 481 | gcgggtactg cacacatgac ccattaacta cggctcttcc ggccttgcca ggttcttcga |
| 541 | gcgggcaccc acccggtatc cttccctcct tcaaccaaca agtactgacc ttgcccgaat |
| 601 | gctgggtgct ggccctgtgc gccggacgga agggcctgat tttctcgcat tttctctaag |
| 661 | cgctggaggc tgcccgcctg gggcgtctcc aagcactaaa ccccacgtgg ctccatctcc |
| 721 | tcccccttcc ccggctacat ccatgcgagg tcccttatgc cctgctggct gtgccccact |
| 781 | tgccagggag cgccttcctg tgaaggggaa tctggggagg cccccgcccg tgcctgccca |
| 841 | cttcctactc tgaaaccaca aacctctagg aaggcccctc gccccgtcgg gtggaaaatt |
| 901 | ggctcctcgg ggttccttca accccaaagt ccgggggcag ggggctgaat ttcgatcacc |
| 961 | gaggagggcg ctagtggaag ggggagggga ggaggcgctc cctcggcctt acccgggcat |
| 1021 | gagtccaggg ggcacgtagg cggcattgaa ctcggtcagt agggtgcccg cgctgcggga |
| 1081 | ggccatggtg ggtgcgcgag tacagcgagc ctggcgctcc gctccgcccc acggtaaaca |
| 1141 | gcggcgggtc acctggcaac ggccacggcg gcgagcctgg caacgccagc tggccccgcg |
| 1201 | gtcctcgcgt tccgagacac tgcgcccccc tggcggccac ctcccggagc agccccatag |
| 1261 | ggcgcgccca gaaggcgcct cccatttccg cgagctctgc tgggtgaccc ctgtcacttg |
| 1321 | ccccggcgcg tcggggctct ctgccttgct gcctgcggga tgtgcagagg ctcagatgcg |
| 1381 | ggagggaggc agaacatcgc tggagaggcc tggcgggatc cgtcttgcgg tgacccggct |
| 1441 | tggaacgcga cgctaccaca aaggacaggc caggtcctga ctttggaggt cacgcacgaa |
| 1501 | gcagctgccc caccgtggct caggcccaga aacctgagtg gccttagggt ccccaggagc |
| 1561 | tatgtctctc caaggcttcc cctgcacccc agctccatgg gagttccagg aaggggctct |
| 1621 | gtagtgggcc gcgctgggcg aggttgccta ggacgctgtg tgtaattgtg tgtgtgcgtg |
| 1681 | cgtgcgtgca tgtgtgcgtg tgtgtgtgcg cgccttgcga agaggagcat ttttcatttt |
| 1741 | tcttcttaat ctctagctga tggcttcctt ctcacctcat catacctgta aactactcca |
| 1801 | caagaggcaa aaagaaaatc atagaacgtc tgggtgtgtg atttacattt gtccccaatg |
| 1861 | ctgccgttca ttttggggat ggcatccgca ggggtagcgc ttgccccaga gagcaggcct |
| 1921 | gctgaaggcc caccccctgt gtaatcctcc ctgtgactgc ttcagcctcc acatttgagt |
| 1981 | ttctccaggg acccttacac cagccttggt gcctagggca ggcacagggc cttcggcttt |
| 2041 | tccataaggg gtgagggtat ggggacagct tccacggtgc caggctcttg gtgactcggg |
| 2101 | tggaggccct gccaccccag ctccctctgc agcagtcctg gtgtcatgaa gaagcctggc |
| 2161 | agttcccact ttgtctccag gtcttgcttc ttcccttcag atgccggatg gagagcagtg |
| 2221 | ctcccctcgc acttcggttc tgtaaatggc agtggatgaa gaccgcagac gctactgggt |
| 2281 | tcacagaatg tggctgccac cagcattctc caaagacttc ccctggcaaa tgccaatgaa |
| 2341 | atgaagggga gccacaggct tcccagaggc tcaggaagca gaaacactga ggcctggttg |
| 2401 | gaaagagagc tgtaggcaaa ggaacggctg caaacaaact gggtggaagg aaaatccatc |
| 2461 | catccttcag aatgcagtca tgtctgtatt tttctaaatt ctcattgggg aacatgttct |
| 2521 | acaataagga aaacatgagt caaagacccc cagccctggt gaggttgacc gcctacttcc |
| 2581 | tcccccattc agggctgccc agccagtcct gctggtaaac ccaccaccct gccttccacc |
| 2641 | tgcctgtgtt ctagtccatc tgtctcgtct gattgggatc ctgtgccatc catatcatat |
| 2701 | tcatccctga atctcagcac ctggctctgg aaagaattca gtaaatgttc attacataaa |
| 2761 | ttatatactc agttaccaaa atgggtaaca gaagaatgga aattaaaaag tgggttctgg |
| 2821 | ctgggaacgg tggctcatgc ctgtaatccc agcattttgg aaggccgagg caggcggatc |
| 2881 | acttgaggtc agcagtttga gaccagccta gccaacatgg tgaaacccca tctctactaa |
| 2941 | aaatacaaac attagctggg catggtagca catgcttata gtctgaccta tttgggaggc |
| 3001 | tgaggcagga gaatcgcttg aacccgggag gcagaggttg cagtgagcct agatcactcc |
| 3061 | actgccctcc agcctgggtg acagagtgag actctctctc aaaaaaaaaa aaaaaaaaag |
| 3121 | agtgggatct gtctcttagg ttttcagaaa ggccagctga ctccattgag agctgctgag |
| 3181 | tggaattgct accattttat ggatgtggaa agtgagattc agcatagatc aatgccttgg |
| 3241 | ctagggcagg atcatgggct ttttcctaaa gatgcacagg gtctataaga ggcctcatga |
| 3301 | aattcactcc tttcagggga ggacctccag agaaccaagg aagaagatat tttctgttgt |
| 3361 | tgttgttgta ccttgtagtc accaagcctt aaaaacacag atcacctgat gacctcatgg |
| 3421 | atggaaaatg ctagtgaatt taggtgtttt tttttttaag acattaaact tatctagctt |
| 3481 | ttgaaaattt agcattcata cttgtattca ataaacagaa tactctaaga catttttaaa |
| 3541 | ttcaatatga ttagataaat gtgagaaagg taagcaagaa ttggttagga aaaagtgcaa |
| 3601 | aggaaaaaaa cgtaagtaga aaaagaaaaa tagggcacag tagcaaggaa atatctagaa |
| 3661 | ggaggaaaga aggctcttgg gacatactgt aggttatttg gaatgcagaa ttcaaaagaa |
| 3721 | gtaacctctt gttaccatgc tgtgaaaaat tagtatttct ctttttaacc tttagactct |
| 3781 | gtttcaggta gatccctgag ctcactcttt tatcctttca acagtaattg ggcatcctac |
| 3841 | ggtgcacagg ataccatgtg gggctctggg gtagagggat gctgtgctcc agggccctcc |
| 3901 | tgaggtcagg aggggaaaag gcaagggaag cagccccagg actcagtaag atgagaggag |
| 3961 | gcaggagcag cacagaggag gaccccaacc cagctggggt gcgggtacag aggcacctcc |
| 4021 | aggagcaggc actcaagctg agtccagggt ggggtggagg gcattccacc aagaatgaat |
| 4081 | agcaagaaca aggctgcaga tgaccctgca cagattccag catcagggat tctggccccc |
| 4141 | agcgtccctt tccttggtgt atgctgctgg aagacaggag ggggcagttc tcttttggtc |
| 4201 | cttagaaatt tccctataga catcccttct cctgccccta gcagcttata acagcagaag |
| 4261 | gccattcaat tctgctcctc tggctggaaa gcaaacatca gcctggctta ccttcgctag |
| 4321 | cctgcctgac ccccagcctt ggggtggggc taggttagtg ccctggatcc ttaaacatgg |
| 4381 | cccctggtag cacataagcc tctgctgcct ccacaaccag ccatctccat catgcatggc |
| 4441 | ctggtcctga gcctcccctc aggcagcagc cccagcctct ctgcttcctg agattcagaa |
| 4501 | acagggatcc cagggcaggg ctcagggccc agcctcttgg gggcacagtc tccagcaggg |
| 4561 | aagaggtggg cgtaggtgga caaatacatt cccttcttct tgtagtgtgc ccctgtgggt |
| 4621 | gggagtgccc cccgccccac atccacccta cctatgctca tgcccactcc tctgtgccca |
| 4681 | ctactggtgg cagggcttgc ttagcaggga agcagcagag ccctgcagag gggtgggcag |
| 4741 | agcctccctt ccaggagctg ggagaagaca cctgaagctg gacagagctt tatctgggag |
| 4801 | ccggcggctg ctgaataatg aattccaact ctgccgcact cccaggctgc acattgggtg |
| 4861 | cacacacaca cacacacaca cgcacacacc gatacacaca cgctgggctg acaacttgga |
| 4921 | ggggcggggg ctgtgaggct ctgtgagtcg ctgcaggagc agcttagctc ggcttggttg |
| 4981 | ccttggtctc tgtgggcagc atcggagggg ggtcgggagg aggaggagga ggcagcggca |
| 5041 | gagaagagag aggcgtgtga gccgtgctcc accggctagc tccttcccgc tgctcctgcc |
| 5101 | tggcagtgcc aggcagccca caccagcatg gccttgctca tccacctcaa gacagtctcg |
| 5161 | gagctgcggg gcaggggcga ccggatcgcc aaagtgactt tccgaggtag ggaagccgct |
| 5221 | gtctcagagg gacgccagct ctgagagctg gaccagccca tgctctggag gtggccgggg |
| 5281 | ataggacagg gctgggagga tgggtgggaa aagttctagc aggggctggg gcgacgagcc |
| 5341 | ttttcacagg tagtcatctg cctgggactg actggccatt gtgatttctg gaaaatcagg |
| 5401 | gtcccctgtt cttccatgcc tgtgtctcct tgtgcttgcc aacatgccag ttccccgggc |
| 5461 | agggcacaga gccctctgcc tggggaggca gaagtgagga ccacatccct gagctcaggg |
| 5521 | agacccagga ccccctcctt ctctctctct ccctctcctg caggttgatt tccttgagca |
| 5581 | cagggtgggg gccgggtatg gagcctgggg cacccagggt gactgggaga aaccaggcag |
| 5641 | ccagtagctc cctgggcccc agagtgatgg gggacactgt tggcttcttt tagatctatt |
| 5701 | catgggcggg aaccccggga gcccctcgcc tctcttctgt ctggtctttt ctcatccttt |
| 5761 | tcactcctgt attcagcgac catttattat gatctactgt gtcccaagga taggggtaga |
| 5821 | aacacagagc tgagcacaac ccagccccag ccccaaggag cctgcatctg ttgggcaggc |
| 5881 | gtggaacaag caggacaggt atgtgagaca gaaggtgggg gtgcagcatg caagctacag |
| 5941 | aagcagcacc ctcacccagg ctggtgaccg gtggtcaggg aaggcttccc ggaggaagta |
| 6001 | acactcagct aatacccgaa ggaccagcgg gtgggagcta ggagaggagg taaggactga |
| 6061 | ggaggcagag gaaacagtgt gcccagagct gagagaggag ctgaaactct ggaactgaaa |
| 6121 | gaggttccat gtgtctacag ctcagagagg gtgcaggagc ggaggccaga gagccaagca |
| 6181 | gggcaaggag gcgaggctgg acctgacccc ggggacagcg gagcccctga gcattttaag |
| 6241 | tggggaaagg cagggccagg ctgactctgt ccttcaccac ccacctctgc ctctccatgt |
| 6301 | ggttgctgcc cagccctgag ggttgggggt acttctcact agacatggcc ccttctcccg |
| 6361 | agagaggggt ctgagagtgg gatggggacg aggtggtgag aagggggcag agaggacccc |
| 6421 | cctatactaa agagcaaagt gagccttggg gcccaggctg gacacagtgt ctgcacctct |
| 6481 | gttggaaggg atgggagaga ccattggcag aacattccag caagagccct ggggcaccca |
| 6541 | catcacctac ccagaggccc tgggatgccc acattgcagc ttgtgttcat agggacaggc |
| 6601 | aggggtggag gtgatggcag tggccctgcc ggcaggcgga ggttaggcag gagggagagg |
| 6661 | gaggtgtggg ctgggctgcc ttttgcctcc caccccaacc cactgactgc tttctctgca |
| 6721 | gcaccctgga tctccctctg tgtgccacct gcaggctcat gctggcttta gaaaaagcaa |
| 6781 | atgtgtcctt tcatctgtga aatgtggccc tgagctccac gggcagcata gtgtggggcg |
| 6841 | gttaagctac aggttgccat cctgctgcag ctgtgctgga acggtccagg ctgcaccgga |
| 6901 | caggcccact tgcaggccga gaaaccaagg ttcaggggta gaacactgcg cgtggcattc |
| 6961 | acggaggagc tgaggcacgg tggtcccagc tctcaggacc tcatcctgag tactcaatct |
| 7021 | tgcaagctct ttatctgctc ctgggccacc tgggggccag caccttgtct gacacccatc |
| 7081 | ttctccttgg agcagtgaag ggctgggcct ttagcctcac tgaccacaca ggaattagtt |
| 7141 | tatttgcaac ccttgctctc tggactgagt ggagaaatcg cttccaagct ccacattggc |
| 7201 | aggaggtggc catgggcaga gctcctgggg aagggggctg ggcagcagga ataggcagat |
| 7261 | gacaagcagt ttccagaaag tacctttatt acaacgaaag atgcctcagc cgctcacctg |
| 7321 | tgtcatctag cagttcacag ttgtaggcgc cccaaaagac caacactgac cacaattcag |
| 7381 | agggaatgga cccgctctac aatgttcctt agcatctccc agcacatgca accactgggg |
| 7441 | gccaagcaag tcctctgcag ggggaaacaa gaaactggta aacacgcaga gggagacact |
| 7501 | ggccccaggc tccccaaggc ttttgagtga aagtcaatgc cgggggaggt ggtgagggag |
| 7561 | cccttggtga gctgtgccca ttggcagtgg ccctaggtag gccagagcag ctggttgaaa |
| 7621 | tatggcttga ccttctgtgc tgtgccatcc aagacactaa ggaaagagcc ctcctgggct |
| 7681 | attgtggaaa aagttctgga tatggagtca gaagccctag atcctacctg ggttctgcca |
| 7741 | ctcaccctca gtttcctcat ctgtaaaatg ggcatgataa taacactcac ttcactagat |
| 7801 | tgcttcaggg aaaccatagg tatggaagag tttgtgggaa gagtattcaa atggtcgatg |
| 7861 | tgtttgtgag gcagccattc ccattctcct tgggagcagc tgctggcccc tgaggtatct |
| 7921 | tctctccaga ccagcagagg gccccatgtg agatataaag ggaagaggag agcacgtcta |
| 7981 | aggggttcca gtctgccagg agaaggcaga gagcctggac tctgctctgt aggagcctct |
| 8041 | gctgagatgt tccgcaggaa cccaggcagg cagacccccg agactcctgt tctcatctgg |
| 8101 | ctgggtgtgc accagctttg cccgtggcca cctcttttcc cactgccctc aggccagtcg |
| 8161 | gcccctcggt cagtgctccc agccagttct gtatctagct cttagttctt actgcccctg |
| 8221 | gctgctccta agctggtgct gccctgttca tgcatttcct gaacatgcta atatttgtgc |
| 8281 | acaggcctgg gaccctgagg tgaaggggcc agcctggccc tccaggagtc acaatcccat |
| 8341 | tgggtcagac aggagatagg gagtcctggg cgaatctcta ttgtgcctgc aggccacagg |
| 8401 | gctcagctgg gtttctcatt aacaaaatgg agacagtggt cctcatttag ctcagaggcc |
| 8461 | tgcagttccc aggagtaatc aagagtgggc tatctaagaa ggagccatct tgaccacagg |
| 8521 | ttgctactca aagagaggaa gtattagctt caggtatttc ctttatcaac tcctgagata |
| 8581 | gttccctaca tcaatcacag agccacagaa cgcagggtgt gaagggtccc gaagttcttc |
| 8641 | tagtccaacc ttctgtccag tgctgagcac caaggctggg ggacctggac tgtaagggaa |
| 8701 | ccaagtgaca gacagtccag ggccaaccct gatgtctccc ttctctttct atcccctgag |
| 8761 | ccttcttgcc aagacatgag gtttggggat tttctgtgtg agataagaac atctaaaggc |
| 8821 | tggatctggc ttccacataa ttcactgtgg ctggaaattg gcacaaaggt ttgcagggca |
| 8881 | tccccctcca ccttttcatt cttactcttc ttcccaccct ccccctgatt cccaccctgc |
| 8941 | tatgttccca ctacattcaa cttccagcca ttcccaaaag ataccacacc cttttacacc |
| 9001 | tccaaacttt gagacatcga tcatatttct tctgcctgga atgaccaccc tccaccttga |
| 9061 | gaacgcccat taattctgct catccttcaa ggcccagctc atatgctacc tcctccatga |
| 9121 | aggagtagta ctttgcacac aaagtactcc tctagcagta ctttgcacac attcttccta |
| 9181 | ctgctctgcc aaggtacatt gcatttcaga aactggccac acctctgcat gctgcccaag |
| 9241 | cttttgagca tcttcaggac agacatcaga catggtttct gtctttgagg gattcactgt |
| 9301 | gtcatgggtt tgagttcttc cactgtggca ctgtcactct ttggctccat ttccccaact |
| 9361 | gtgagctctc accccagaac tttctatcca aggaggatca agggactgga agaggcctca |
| 9421 | agggccaaga accaagaacc ttggctctta ctccttccat caacttccct aacccagaga |
| 9481 | atcttctagg gctccagagg ggcctaacga tttttttttt tttttttttt tttgagtctc |
| 9541 | gctctgtcgc caggctggag tgcagtgcag tgcgatctcg gctcactgca acctccagct |
| 9601 | cctgggttca agcgattctt ctgcctcagc ctctggagta gctgggacta caggcacacg |
| 9661 | ccaccatgcc cgactaattt ttgtattttt agtagagacg gtgtttcacc atatttccca |
| 9721 | ggctggtctc aaactcctga cctcatgatc cgcctgcctc ggcctcccaa agtgctggga |
| 9781 | ttacaggtgt gagccactgc gcccagtcaa gcctaacaaa tattagcaag ttcagctcca |
| 9841 | gcccataggt gggaagcaag agggattgcg tgtgtaagcc agagtcagtt aggggaagac |
| 9901 | agaggaagga gaaagggcag acgggaaagg aggtgggagc aggctctgag ttggcccccg |
| 9961 | gagctcagaa gggaggcggg agtttttatt gagcagggga aatgggcggt atttaagaag |
| 10021 | ccaccgaagg gtcttagttc attggcagga tcaaaggcca tgaaagggcc aggcgtggtg |
| 10081 | gctcatgcct ctttccgagc cttactgcga ccacacgtgg ggcaggatct caccatctga |
| 10141 | cagaggagaa gaaacataca cacagaggtg aaatgagtgc agcatacagg agggccagcg |
| 10201 | gtgggggtaa atagcaacaa tgttcagagg atgacagctt acttagagct acagagacga |
| 10261 | gggaaaagga gcaggaggag gaagtgccta agctgggtct tgaaaaactg cccctgtttg |
| 10321 | tacctatgga gatgcaggaa gtgaggaatt ggtgatggag gaaggtgaag tctttttggg |
| 10381 | tgagggaccg accagaccag aggccagagg aggagaattg cagccaagtt ccatgtcggg |
| 10441 | gaagccacac catgtagctg gagcagaggc tataggaagt agaagaggga gaccagctag |
| 10501 | ggagggagca gtgggcctgc tgagtgattg tgcagggaag ggttgcagct gaggcactgg |
| 10561 | ggacaagatg tccccctact gttggctgca ggctccacct ctgactccac attacattta |
| 10621 | ttttccccag taaaatgagg gagccctccc tcttgatgat aaatatagct actatttgga |
| 10681 | aacttatctg ccgcccctgg taaaggaggc agaataccca gtgcacccac ccctgaaatg |
| 10741 | ctcctgcaat gcctaggcct gtctgtgggc tgtggtccag cctagcaccc cctctcttgg |
| 10801 | agaatgtgag gttggcattg tccctgctga aggcagcaat agaggggacc cttacgacga |
| 10861 | ccttggcagc cggtggctgg ctgtggacac agccctgcgc ttttgtttta gtcctaacgg |
| 10921 | atatgccccc tgcatcctcc attcttcaca gcacactcag tccccctcac cacacctgag |
| 10981 | ggaaatcttc tctgcctaat gccccacgta gtgaatgttc tcccctcctc cctcccccag |
| 11041 | agcaagccat tgcacaccag cgaagggcag acagagcaca cagaaaattc cccagacttc |
| 11101 | tgctttgata ggaagtgtat tttcatgtaa tggaaatgat tgtaaaactg ccttcccctg |
| 11161 | caaaagccct caggaatatg ctgctggaaa tgtgcttgag aacagacttg caaatcattt |
| 11221 | ctctgaattg ggaagtcttg gttatcttag ccacttttac cgatcatgtg aaagccacat |
| 11281 | ctctcgcacc cactcccatc cctgggtctc atttttttct tttttctgtc gcccacgctg |
| 11341 | gagtgcagtg gcacaatcat agttcactgc aacctcaacc tcctgggttc aagcgatgct |
| 11401 | cccacctcag cctcccgagt agctaggact acaggcacgc accaccatgc tcagctaatt |
| 11461 | tttgtatttt tagtagagat ggggtttcac catattgccc aggctggtct tgaactcccg |
| 11521 | ggctcatgtg agctgcctgg ctcagcctcc caaagtgctg ggattatagg cgtaagccac |
| 11581 | tgtgcctggc cttttttttt tttttttaac tttttatata taaaaaaact ctcaaataca |
| 11641 | tacaagagtg gggagaacag tatcatggcc ctatgttgta ccatccaatt tcagctacca |
| 11701 | tcaattcatg gccaatcttg cttcatttgc atcccatcct acttcctcac cccaaattat |
| 11761 | tttgaagaag atcccaaacc ccataccatt ccatctgtaa atattcagta cacagttata |
| 11821 | aaagataaga gctcaaataa ataccacata ctttgtcatt ttaaagaaat taataacaat |
| 11881 | tccttagtac tataaactaa tcaggcagtc atcaaattcc taattgtctc atcaatgtca |
| 11941 | taattttttt ccaatttatt aaaagcttca ttttaatgtg ttttgtaaat caggtattta |
| 12001 | atcatttatc cactcgttct gttgaagggc agccatgtgc cacgcactgg gggatggtgg |
| 12061 | ggaatgagac agatgtggtt cctgtcctca aagggggaag atgaccactg cacccatcat |
| 12121 | catgaggagc tttatggaag ggaggcacag gtgcccaggc agctcatggt gaggaaaccc |
| 12181 | acttagccca ggatgggggg aagccacccc agtgcgtgag ccagagtcag ttaggggaag |
| 12241 | actgaggaag gaggaagggc agatgggaag ggagggagga gcaggctcct agttggcccc |
| 12301 | tagagcccgg aagtgagtca ggagttttta ttgagcagga ggaatgggcg gtatttaaga |
| 12361 | agcccttgaa gggtcgcagc tcattggcag gaacaaaggc catgaaaggg ctgggcatgg |
| 12421 | tggctcacgc ctgtaatccc agcactttgg gaggccaagg cgggggggat catttgaggg |
| 12481 | caggagtttg agaccagcct ggccaacatg gtgaaaccac atctctacta aaaacacaaa |
| 12541 | aattagccgg gcgtggtggt gcacgcctat aatcccagct actcgggagg ctgaggcagg |
| 12601 | agaatcgctt gaacccagga ggcagaggct gcagtgagcc gagattgtgc cactgcactc |
| 12661 | cagcctgggc gacagagcga gactctgtct caaggggggg aaaaaagcca tgaaaggctc |
| 12721 | catcccaggc agaggggcta acactagtgc agacgtggtg gtgtggagat gcatcagggg |
| 12781 | agtgtggagg ggagaccgga aggcagggca cgggggacgc agccaaacac ggagggtctt |
| 12841 | tggtgtcaca ctcttagcag gagaatggga tgctaagatc ttgttttgga gagaaggctc |
| 12901 | tagaggtgag gactgcgggc agggacactg gggaggaagc ccggggcagg cggagggctg |
| 12961 | agtgcctcag caggcgccat gagagaggaa ggagcggcgc tgggatcagg ggagtgagtg |
| 13021 | acagggcagg gcaagagtca attgtggtcc tggggaccac cgcggaccca gggatttggg |
| 13081 | gtacagggcc ttagttgatt ctcatctaga caggtgccag ttgctgacac cctgaattct |
| 13141 | ggcaaacatg gagacatcag ggtggaaaca cctggagcca ctgccatcca ggtgggcgcc |
| 13201 | ttgagggcca ggccccttgg ctgctttccc agcagcagca tggagcctgg cacagaacag |
| 13261 | acctggcata gaagtgggag caaggaacac cgcctgtggg tgcaggagca gtgatcagtt |
| 13321 | agcaacaggg gcccccctgc agccagccat ccaggcagca ccagacagtg atccatttct |
| 13381 | ctcggtgaca gttctagaaa aggctccgga gacagggact atcatgtgat catttttacc |
| 13441 | ctagaccgct tgaccgcttt ctgtctgaac tgatccacct gctagacgct gcctcaacag |
| 13501 | tcctcgtttc tattttattt tcttttactt caaagcagaa gggctaatct gctgaggtgg |
| 13561 | agacgagttt tcacccactg gctttttttt ttttcagccg aagtttaagg taaagtcagg |
| 13621 | actgcagttt ccacaatatt tttaccctat cggagagtaa aagagtcacc ctcccattat |
| 13681 | acctcattgt attcccagtg cctggcacag aatgggtact ctacacactt gtggatcact |
| 13741 | gggaccacaa gctcctctgt caccgtaaca ggggaatcta ggacccagca gttgatgact |
| 13801 | gtgtgggtgg cactgtccaa ggctcaaaga caaataccac aggcccttcc tgcctcagtg |
| 13861 | ccagggtctg aaaaatggga accagcgctt tcagtcggtt gcagggcaaa gtcagagttt |
| 13921 | gagtgaggac ctggaagaag ggtttgagct gagccagaga gatgggattt atcatccctg |
| 13981 | ccctgcccct gcctctcaga tgaatccctg acccaagcct aagtttccat agtgtaaacc |
| 14041 | tggatgttag cagggtgggt taaggggaaa tacatgagtg gaggtagaaa tgatatttta |
| 14101 | gtacaatttg tggataataa agggttagag ttccatgggg cctccattta gctgagaaat |
| 14161 | ggggaaaatg gaaggggtaa ccttttccag tgggaggccc agggactctg cagtatccca |
| 14221 | agtctggctc tgtgagtcat tggtgatttt cagagagtat actatgtaag aaacatgagg |
| 14281 | aacagctgct ttcttggaca actctttgaa gtgaatttct ttcttctacc atgccatcaa |
| 14341 | ctgtcattat aaaattgaag atgtgtttct catggggaaa aaaattgtta ttacaagaga |
| 14401 | tatgggcaat tagacaagtc tcaatacatt tcaaaagact gaaatcttac agagtatgtt |
| 14461 | ctctgaccat agtggaattc agctaaaaat caataataag aagattatct ttgaaagttc |
| 14521 | caaatatttg gaaattaatg cctttcttaa cctatggtca aagaaggaag taaaagagaa |
| 14581 | attatgaaac atttttaact gaattataat gaaaatacaa catattaaca tttatcattt |
| 14641 | taagtactta cagcagaaaa gaagaaaagt gtaaaattgt aatctaggtt tctgccttaa |
| 14701 | aaagatacca aaagaaaagc aaattaaacc caaatcttga aaacattatg ttaaataaaa |
| 14761 | gaagccagac acaaaagacc acatactgta taacctcatt tacagtcagg catcgcttag |
| 14821 | tgataggagt acattctgaa aaatgcatca ttaagcgatt gtgtcattgt gtgaacatca |
| 14881 | tagagtgtac ttacacaaag ctagatggta tagccaacta cacacctagg ctacatggta |
| 14941 | tgacctactg ctcctaggcc acaaacgtgt acagaacgta actgtattca atgctgtagg |
| 15001 | caatcatagt acaatggtaa gtatttgtgt atctaaacat agaaaagata cagtaaatac |
| 15061 | aatattataa tcttatggga ccactgttgt atatccaagt ggtcgttgac caaaacggtg |
| 15121 | ttatgtggtg catgaatgta tacgaaatgc tcagaacagg caaatccata cagagaggag |
| 15181 | atttgtggtt gtcaagggct gtggggaggg agaatgggga gtgactgctc acgggtatgg |
| 15241 | agtctccttc cagggtgatg aaaatattct ggaattaggt agtggtgatg ggtgtacaac |
| 15301 | cttgggaata tactaaaaac gactgaactg tgcactttag aaggatgaat gttatggaat |
| 15361 | gtgaattata tttcaataaa taaaaatcaa acacccccca ccaaattaaa cccaaggaca |
| 15421 | gtataaaagg aaggaaatag aaaatagaca acagagaaat ttaacaaagc caaaagttgg |
| 15481 | ttcttcaaaa aaaattaata aaatagataa accctagcaa gacttatcaa aaataaaaag |
| 15541 | caagaaaaca caaattacca atatcaggaa taaaagaggg aatatcatta catttaaagg |
| 15601 | aaaatatggg aatattacca ataacttacc tcaataaatt ctacaactca gatgaaatga |
| 15661 | ataaatcttt tgaaaaacaa cttaccaaaa ctgacagaaa aagaaatgga aaatccaaag |
| 15721 | agcctccata tctattaaag aaattgaatt tgtaataaca atgatgatga tgacaataaa |
| 15781 | cttccttcca caaagaaaac ttcagatcta gatgatttca ctgctgtatt gtagaaaaca |
| 15841 | ttcttttttt ctttttttga gatggagtct cgcactgtca cccaggctgg agtgcagtgg |
| 15901 | cgcgatctca gctcactgca acctctgtct ccccagttca agtgattctc ctgcctcagc |
| 15961 | ctcccgagta gagcagctga gactacacgc aggtgccacc acgcccggct aatttttgta |
| 16021 | tttttagtag agacagggtt tcaccatgtt ggccaggctg gtcttgaact cctgacctca |
| 16081 | agtgatctgc ccatatcggc ctctcaaagt gctgggatta caggtgtaag ccaccacacc |
| 16141 | cggcctgtag aaaacattga aaggaaaacg taataacaat cttacacaaa ctctttcaga |
| 16201 | aaatagagaa ggaagagcac atctcaattc attttttatt atcaaaacct gacaaagacc |
| 16261 | ttacacaaaa agaaaattac agcccaatat ctctcatgaa cacagatgta aaaatcctta |
| 16321 | acaaaatatt agccaactga atagcaatat atgaaaagaa taacacatca tgacaagtga |
| 16381 | gtattatccc aggaatgcaa tgttaattta aaagtagaaa atcaaaatat tttaccatat |
| 16441 | taacacagta aaggaaaaaa ttcatgatta tatcaataga tgcagaaaat gcatttgaca |
| 16501 | aaattcaaca cccattcatg ataataacta tcagcaaact accaataaaa ggagcttcct |
| 16561 | caatctgata aaaatcatcc agctaacatt atacttaatt cagaaatatt gaacattaag |
| 16621 | atcatgagtc aggcaaagtt ttctactctc accacttctg ttcaacactg tgctagaatt |
| 16681 | ctagccagta caaggtggca aggtaaaaac aactcctaca gattggaaag gaagaagtaa |
| 16741 | aactatcttt attcacagaa aacctgattg gttatgtaga aaatcctaag gaatctatta |
| 16801 | aaaagctact acaattaatg aatgaattta gcaagttttc aggatatatg attaatacac |
| 16861 | aagaaaataa attttaccaa agacaggaaa gacttccacc ctaaaaacaa aacaacacaa |
| 16921 | aatgctgaga gaaataaaaa aaaaaaaaaa ccaaacatgt agaaaataga ttatgtttat |
| 16981 | ggactgaaga ttcataattg ttaagatgac aattctccac aaaatgatct atagactgaa |
| 17041 | tgcaatccta ataaaaatca caacaaacta ttttgtagaa attgaaaact actttaaaat |
| 17101 | ttatgtggac atgcaaatga tctagaatag ctaaagcagc cttgaaaatg gagaagagaa |
| 17161 | ttggagggtt cacaccacag ctgacccctg aacaacatgg gtccacttat atgtggattt |
| 17221 | tttttttttt tctttttgag acagagtttc actcttgttg cccaggctgg agtgcaatgg |
| 17281 | agcaatctca gctcactgca acctccacct cccgggttca agcgattctc ctttctcagc |
| 17341 | ctcccgagta gctgggatta caggcatgca ccatcactcc cagctaattt ttgtattttc |
| 17401 | agtagagacg aggtttcacc atgttggtca ggctggtctc gaactcctga cctcaagtga |
| 17461 | tccaccagcc tcggcctcct aaagtgctgg gattacaggc atgagccact tcgcctggcc |
| 17521 | atggtttctc ttccttatct tttttcctaa cattttcttt tctctagctt actttattgt |
| 17581 | aaaagtacag tacataatac atatacaaaa tatgtgttaa ttggctgttt atgttatcat |
| 17641 | taaggcttct ggttaacagt agtctattag tagctaagtt tttggggagt caaaatttat |
| 17701 | atgcagcttt tcaactatat gaggggctgg tacctctaat ccctgtgttg ttcaagggtc |
| 17761 | aactatattt aattataagt ctaactataa agttaaagga attaagaaag tgtggcattg |
| 17821 | gtctaagaat agacatatag accaatggag cagaatagtg tccagaaata aactctgtac |
| 17881 | atataaaatc aattgatttt caatcaaggt gttggatatc tagaactagg tatctatatg |
| 17941 | gagaaaaaat gaacttcaaa ctcctacctc ataccatcca caaaaattaa tgtaagatgg |
| 18001 | attatagaat taaacattaa aaacttataa gcttctagaa gaaaatatag aacatctttt |
| 18061 | tttgtattct tgggttaggc aaaggtttct taaagaaaaa ttttaaaaga ctaaacataa |
| 18121 | gaaataaatt tcactaaaaa cttgcatttc ttaaaaattg gaaactctct ttggctagtc |
| 18181 | acagagtaaa aaaaattgaa aactcctatt cataaaaaaa tcacatttaa gaaggcaaga |
| 18241 | gaaggcaagt cacacacagg aagaaaatat tcacatttat ctgacaaagg acttgtagcc |
| 18301 | agaatatata aagaatccct ataagtcaat aataataaga caaattatga aattttttat |
| 18361 | gtaggcaaaa gacttgaaga gacactccat agaataagat agacgtatgg ccaataaaca |
| 18421 | tgtgaaaatg tgatcaacat cctgagtcat tagagaaatg aagatcaaaa ttacaaagag |
| 18481 | atattatttc acatgctcta aaatagctaa aatgtaaaag tctgacagta atcaaatgtt |
| 18541 | gatgaggatg gaacaactga aatttttttt acattgctga taagagtgtg aaatgatgca |
| 18601 | atccccttag aaaactattt ggcgatttct ttcttttctt ttcttttttt ttttttttgg |
| 18661 | gatggcatct cgttctgtca cccaggctgg agtgcagtgg tgtgatcttg gttcaatgca |
| 18721 | acctttgcct cccgggttca agcgattctc ctgcttcagc ctcccgagta gctgggacta |
| 18781 | caggttcgca ccaccacgcc tggctaattt tttttttgta tttttagtag agacagggtt |
| 18841 | tcaccgtgtt agccatgatg gtctccatct cctgacctca tgatctgcct gcctcagcct |
| 18901 | cccaaagtgc tgggattaca ggcatgagcc attgcgcccg gccagcaatt tcttataaag |
| 18961 | ctaagggtac ctatcctgtg acataaccat tctgttctta ggaatttcct caagagaaat |
| 19021 | aaaattatat tttcagaaaa agactcacat gaatgtttac agcaactttg ctcatatagc |
| 19081 | ccaaccctag aagcacccaa aagtttatca tcaacagaga aatggaccaa gaagttgtgg |
| 19141 | tataggcatg caacgggcta ttactctaca ataaaaatca atacattact tatatatgca |
| 19201 | acaacatgga tgaatcacaa aaacattacc ttgaccaaaa gaagccagac acacaaaaag |
| 19261 | tacattctgt aggatacctt ttatatgaag tttaaaacag gcaaactgat ctttggtgct |
| 19321 | agaaatcaga gcactggtta ctaagggact agaaatcgac tggaaaggga catgagagaa |
| 19381 | catgtggaac aaatggaaat gttctatgtc ttgattgtgt ggcggtatac agggaaatgc |
| 19441 | atttattgaa actcattgaa ttttacactt aagatccatg aatgtaagtt tcacctagtt |
| 19501 | ttaaaaaaag aagagagact cacatctaaa atacctaaaa cttgaaaaat attatataag |
| 19561 | atgaggaaaa aaattatttc tgattccatg ctactaaaaa taagctacaa atgtgattca |
| 19621 | taatagaaga agccattttt atatttagca cataacttaa aggtctaaag gacaagcaag |
| 19681 | ctgggcgcag tggcccacgc ctataatcct agcattttgg gaggccaagg caggaggatc |
| 19741 | acttaaagtc aggaatttga gaacagcttg gccacatgct ggtgaaaccc tgtctctcta |
| 19801 | aaaatacaaa aaaagttagc caggcatggt ggcacacgcc tgtaattcca gctacttagg |
| 19861 | aggctaatgc aggagagtca cttgaaccca ggaggtggag gttgcagtga gcggagatta |
| 19921 | cgccactgca ctccagcctg ggtgacagat caagactccg tctcaaaaaa ataaattcaa |
| 19981 | aacaaaatag aatgaaggag aaacaagact atttagtaga ctgagaatag ctgtttctta |
| 20041 | ttgagggata aactgcacca aatgctattg taagcattat tatttccttc attttaaggg |
| 20101 | tgaggaaaca agggcaaaga gaagttaatt agcttcatcc agggcacgca aactaggaag |
| 20161 | aggcagctgg gatttgaact cagggactct ggcccaagag ccttaacctc tatcccatgc |
| 20221 | cccctcgtgc ttgtaaagga cttgatgctt tacttagact ttcccacaac agtttcttgt |
| 20281 | catcctcgtg atggtcccag gacacaggct ggtccaggat aatgaccccc ggctaacaga |
| 20341 | tggtgagtct gagaccccaa ggggttggat ggccagctcc caggcctcca gaccatgggc |
| 20401 | cgttgtgccg ggccgcacac ctgagtgggc ctggcttttt cctgcacgca ggggtgcttg |
| 20461 | ggccctgctt cctggtgctc catgggagta tctggccttc aaaaggaaca gatcgatctg |
| 20521 | aagtggggag agagaaaata cagcaggacc atcactcaga gagtcgctgt agaggaagag |
| 20581 | agggagagga gacgccagga catgggagct ttgtgggagg gaatgggact atttgctgag |
| 20641 | ctttgtacag cccagcccag gcagtgcata caacaaggct ttgctgattt taaataacac |
| 20701 | aaggaaatag cagccccagg tctgagtcac cagcagagtt ttactctatt tctcagctca |
| 20761 | cacagggaca atagcaatgg caggcactgc tgggagatag gctagtgggc tgggccctgg |
| 20821 | caaaatcacg acgtccttga aaacagtccc aggaccttct ccttcccctt cggatggccc |
| 20881 | accacctcac cctctgccct ttcgggaccc cagcccctct ccagtcttgc ttccacaggc |
| 20941 | tgctccctga gggcagacca ttcttgcttt tcccttcacc atcgggactc ccctgtcctg |
| 21001 | tgtccagctc cttggaggct ctactctctg ctctacgctt tcaaacattt ccttacactg |
| 21061 | ttctctctgc ctggatttcc ctccttctcc ttgcttccca gtctctctga atatccagat |
| 21121 | ttcttctggt cttctagcgt caatgcgtgt gcctctgcaa tgcctcctta atccactaca |
| 21181 | ttgagagtca ttgctccttt tcctgtgttc tcactttatt tacacttttt gcatgccaat |
| 21241 | gacaaaattc tgccttgtat catcggcaga attttccatg tctgatatat ctccctctgg |
| 21301 | attgtaatac gctcttaaag gcatcgttca gattcgaatg atcttagtac aactcccctc |
| 21361 | tgtgaaggcc aaatggcaca caagccagga gctagaaagc cctggttgcc tgtggaaatg |
| 21421 | aatgaacaca catgggctgg cagccgtgtc cctgcacacc tgccttttct cagaggtgtg |
| 21481 | gccctagcag ggtaagctgt ctggaagagg gagctatttt gtgcagatgg aacattttgt |
| 21541 | ccccttaaat catgtcccat gaaaggccag catggcatcc tgcttctgaa acaagcactg |
| 21601 | agctcgtctc catttggaga agatctgtcg tgtgggtatt tttaaatggt gaaaggagaa |
| 21661 | atgggtatat ctgataccat ggcacttgtt acactttaag cacagactct gttattcata |
| 21721 | ctccatctat tgactcaggg aggagtttat ttcaaaccaa acagctcagc tatcccagga |
| 21781 | gcagctgcct cagaaggaag gaggatgctg ttctatttcc cccatcgaac ctccttctca |
| 21841 | ctcgatccac aacagccttt ccatgcaagg aagaggctat tttctttcaa gctttattct |
| 21901 | ccattttccc tgtggcaaga aaggtgattg gatattggga tttgtaatgg ttttatctga |
| 21961 | aagccattta aaatgaagct ggaatgtcaa caagactgac gctgaatgga gtagatgtga |
| 22021 | agtggaaatg aacttgaaac aagagatggg gttagtcatc cccctgatca cttggaacag |
| 22081 | atgatggagg tcccctgcct ctgctccagt gaacagaaca gaaccacttg aatactgcca |
| 22141 | gccactgttt gtacataccc tcctgaaacg gctcttccaa aatgctgaag gacattttgt |
| 22201 | tttcttaata atttggcctt tccactgttt ctgtatgatt gatgtgtttc agcaaacctt |
| 22261 | ttttaaaaaa gaatatctac aggtaaattt agctcatcat gtttgagaat attcaccatc |
| 22321 | tctaaatccc cagggcctaa atcaatgagg ttttagcaca ttttgaaaca gaaccctgat |
| 22381 | gtataaattc tgcaatggct gatttcacgt attttacttc ctctctaaca aagctatgga |
| 22441 | aaaatgcaca agcaggggag ggtttgatcc tcggtgtttc ctgcagatgt gaatctgaca |
| 22501 | ccaccttgga gcagggcccc tccccacctt ctcccaatcc tccgctgggt tgctgcattt |
| 22561 | ttcactccaa gagaccccgg aggacagcta tatccgaggc ttattaaaat cttctaggat |
| 22621 | gcaaaggcct ttggttattc agagcagcag gtctttaggg gaagccccca tacacaaaca |
| 22681 | tgctcagctg attctcaatt tatattgtgt gttacctgcg gggaaaatta aaagctcaaa |
| 22741 | cctcaggcac tttccctctc ctcccttgat tgcccggggg cttgttgttg agatatttct |
| 22801 | tgttgatttt tttgtttttt atgtctctgg ctggtgctaa acattctttc tttcccatca |
| 22861 | tgtttacttc acatctcttt gccgtataga tagcttctgc tttatggttt tttcctcctt |
| 22921 | atctcagatg cagccagccc ttccccacct gcccccgccc caaaacacac acacgaacac |
| 22981 | acaccctttc agactgcatc cacactctct gtttcagtgg atctgacatc aacgaccccg |
| 23041 | ccacccccgg ccctcgtcag aggggagctc tgcattgaac taggactagc tcctgggtca |
| 23101 | taaaagttgc taggaccctg gagagctctt actaaacaga tgaggccacc actgacagag |
| 23161 | gagagaggtc agttcccgga gggaacgagc ctgctttgct gagccccctt ccttgcccag |
| 23221 | cccccagacc catcacaggg aaggttcaga ggagctctga cccctccagt acctccttgg |
| 23281 | cctgacgccg ctctagcccg ggctcccagg ttttctgtag ggagaggagc acagtccgct |
| 23341 | ccacccatgc catgggcttc atcagtgaca acccaaactc acccccaaat aggaatggct |
| 23401 | tcaacctgga gacagccctt caatgaaatg gtttatgctg gtggagattt aaaggtattc |
| 23461 | gtctttcggc tgggcgcggt gactcacacc tataatccca gcactttggg aggccgaggt |
| 23521 | gggagatcac ttgaggccag gaattcgaga ccagcctgac caacatgcga aaccccatct |
| 23581 | ctactaaaag taaaaaaatt agctaggcac agtggcgcat gcctgtaatc ccaactactt |
| 23641 | gggaggctga ggcacgagaa tcatttgaac cccggaggca gagtttgcag tgagccaaga |
| 23701 | ttacactact gcactccagc ctgggtgaca gagcaagact ctgtctcaag acaaacaaaa |
| 23761 | agggtgtttg tctttcaatt gcaaaaatca agcatggtca ctgaaaaaaa attcaaattc |
| 23821 | acatttcatt ttgttttgtt ttgttttgtt tgtctttcag ccaggtgcag tggctcacat |
| 23881 | caaagtatgc tgctttcaat atcttctcac tctccctccc cagggataac cactttcttt |
| 23941 | tttattttat ttatttaact tttttgagat ggagtttcac tagttgccca ggctggagtg |
| 24001 | caatggcgca atctcggccc accacaacct ccgcctcctg ggttcaagcg attctcctgc |
| 24061 | ctcggcctct tgagtagctg ggattacagg catgtgccac cacacccagc tatttttgta |
| 24121 | tttttagtag agacggggtt tctccatgtt ggtcaagcag gtctcgaact cccgacctca |
| 24181 | ggtgatccgc ccgcctcggc ctcccaaatt gctgggatta caggcgtgag ccactgcgcc |
| 24241 | caggggggta accactttca gtggtttgag atgtttgtct cttcatagaa gaaatatatg |
| 24301 | catatagttt gggttttggt atttttttta attaatggag ttctaatata catgctgcct |
| 24361 | tttttccctt accatggaat tgacacagga taataaatta attctaagca acaaattttt |
| 24421 | ctttaaccca tcctgtctct aggtttctcc tcacagaaat tacaacccct tctcttgtgg |
| 24481 | ttccatccca tccctaaaac agtatttatc ctcccttctc tgtaccatta ctgtttcttg |
| 24541 | tgcgaaattg taccttggag tatgtactga atggtgttgt actggaggcc tggcgcggtg |
| 24601 | actcatgcct gtaatcccag cactttggga gaccaaggtg ggcgggtcat ttgaggtcaa |
| 24661 | gagttccaga cgagcctggc caacatggtg aaaccccgtc tctactaaaa atacaaaaat |
| 24721 | tagctgggca tggtggcggc gcctgtaatc ccagttactc aggaggctga ggcaggagaa |
| 24781 | tcgcttgaac ccaggaggcg gaggttgcag tgagccgaga tcgtgccact gcaatccagc |
| 24841 | ctgggaacag agcaagactg catctcaaaa aaaaaaaaaa aatggtgttt cccttgcact |
| 24901 | ggtgccctgt tggctcctgg cctcccttct agaccatcag ctacctgtgg gtgggagcct |
| 24961 | gtgcctttgt cattggtcca tcctctatcc cgaggccccg ggacatggcc tagaacatca |
| 25021 | gagactccag cggctgtttc tcaaagtgaa ctgaactagc tggtgtttcc cacacgatgg |
| 25081 | agccccctcg acctgccctc gattctctcc tgacttattt ctccccacat cttgggccag |
| 25141 | ttccagctgg actagcaaag agggcagctt tacctctgtg ctcccaacat gccctagtgg |
| 25201 | gtggcgtatg gatgggggag cctgggacaa tgtgtgtcca tctcacacac tctctacttc |
| 25261 | ccatgccagt ggggaaagtg ggggcaggaa tagagcccgg gagggaactg ccagagactg |
| 25321 | tcttctctgc taaggctgac aggaagacgg acaaccatga cagtggtgga aggggaaggc |
| 25381 | ccttggccca cggggaatgg ctgtctggaa gctgacttgt tgttgggggc ctggtttggg |
| 25441 | caggaacccc tggggtggct gcagaaggag gctgggcttc acagacccct gtcggcaggc |
| 25501 | aggggctacg ccccctatac taggcttctg ctcagggcag cagggcccgg agccaccagc |
| 25561 | agagctgagg aggctgcaga ggaggctgag agatccatgg aggaagaaca tggtggaaaa |
| 25621 | gagtgcctga ggtccgcttc cacggccact ctgaccagcc tgggccttct gtgccttagc |
| 25681 | attcccgttc ctaacatgga actcatggcc tttgacccgc ttccctcacg aggctgctga |
| 25741 | gagggtcaga gaagaagccg catggggact ggcctcaccc tgggagaggt gagcaagcca |
| 25801 | cgaggtccca tgttgcatga aaagtcaaat gctgttagga cgactcccag gatgaggagg |
| 25861 | tctgacccca tgctcatcgt ctggacagct ctgaccctag aatttatttc ctctttcccc |
| 25921 | acagggcaat ccttctactc tcgggtcctg gagaactgtg aggatgtggc tgactttgat |
| 25981 | gaggtaggag gcccaagact cccccctccc tcagccctga gcccagaggg gaacagccac |
| 26041 | ccttcgctgc ctcttgcggg cacacactgg ccccaaatcc caggcactgg cctgctctga |
| 26101 | gcccctcacc tctcagctgc ttcctgaagg aggtggtaag gagggtgtgc aggaactccc |
| 26161 | tcccccatgt tccccccaga aacctctgca caggtgaggc ccgtgtgcaa atgacacggg |
| 26221 | gaacagcagc ctcgcccacc tcgacggccc tgctgggtct gggcctgtta ttccctgtgg |
| 26281 | agaaagagcc cacaggtgct gtagacctga atgtgagcca ccagctgagg gcccaacgag |
| 26341 | gcaggcgagt gttggggacg tcgcaaaggc cagtctgtgt cagtccccag gggttgaaga |
| 26401 | gcagggcagc cccgggcact gaggtaggag ccccagtcac cagggaaaca ttgtcaagca |
| 26461 | ccccacctga gtgagggcgc catctccaga ccttgagggg aagcataggg aacagaagac |
| 26521 | agtctggatt ttcagaaaca gctctggggg ttccatgaga aaagacgtga gctgctggtc |
| 26581 | tattgacaac gatttttctc aatcctcact ccagctgggc tgttgtcaca attttatcag |
| 26641 | caaaggagca ggcgacacca tcccacaggg gtgcccagga gcagtgagag gacttacaac |
| 26701 | gcttccctct ccctgccctt cccctcggta cctggccggg ctgggagccc tatcctcaca |
| 26761 | cacacacacc agctcgagca gcctgcggcc tcctccgcct cctcacattc tttcgtctat |
| 26821 | gtgtttgctg cttccagaat ctatattccc ctctggctgc tgtaggttct ccagggatga |
| 26881 | ctttggagtg agggccagca gtcatccgtc accatcttag cacaaactgg aagccatgta |
| 26941 | gtgaccctca aatagtgtac cccctctctc ctggggttgg ctctcccgct tggctctgtg |
| 27001 | ggggctggga agggcctcat agcagactgt gcctcttgag gttggctgct ggcgttcggc |
| 27061 | tgagcagcca ccaggctgac acttggcacc agctgtctcc ccctcctcca gaaaccaggc |
| 27121 | cacacgatgt ggctgtgtcc atcgacccag agctggagac acagggagca aaacctcgct |
| 27181 | cctcactcag gcttaggcac agccatcaac catcgcggcc cagcaccaca ccctccccaa |
| 27241 | ccacttcagg gcgcagttgc cacgacctcc ctggtacgtc cccactgcta tgcaggacag |
| 27301 | gtgaatcact catttaaagt gaatcactag agctaaggaa gtttctgtcc ttaccttctc |
| 27361 | cccctcctgg ctgtacaatg acctcagttt ctaaacctgc caccatcttt gtcaaatggg |
| 27421 | gttggtgatg ggtgtgaagg tctctgtgaa atgatgaaca aaatgaaggg ttatggtgag |
| 27481 | agtggaatca tggctgccca ctgagacagc tgtcatagat gcttcaggct tgccccatta |
| 27541 | cacacccggc ctgctccctc ccctccccat ttcctcagtc agggcactgg gctggctggg |
| 27601 | agaagatgcc agcagcctgg cccagtttcc catagtccta cctccctggg cttctgccca |
| 27661 | ctaatccacc aggcacagca tctgactccc tcctcccaag actcccaggg gatatgtcag |
| 27721 | cccaggcgtt cagccagggg gcaacctgat gccccttcca agggcactgc cacccttttc |
| 27781 | catgcccagc gccttggaca cctgagccac aggtatgcac gacattcaaa gttaatcacc |
| 27841 | atgtcgttcc tcttcccaac tccgcccagc ctgcctcagg gggagagtct gtctctgctg |
| 27901 | gccctgaaca aggggccaca ttccgagcat ctagtgcatg ccaggccggg cttgagatat |
| 27961 | cccagaggca ggaacctggg ctcaacaccc catgatgatt tgtatgggag cttagggatg |
| 28021 | gggtagccag agtcagtgtg gagagactgg ggcagggcag aagcagttat ggaagaagca |
| 28081 | catgactagg gtcagagagc agggcacgcg atggggagaa gaggctcctg cccggggaaa |
| 28141 | gtgctgcccg cccactgggg agacagggaa gtttctggtt gttgcaatga ggagcctact |
| 28201 | ggcatttagt ggggtgggga gcaaggatgc agaatgactt gcaatgctca ggccatcccg |
| 28261 | cacttcccac ctgggagccc cgtgggaaga tggtggcagc cccagcagca gcactgagct |
| 28321 | gcttcccgag ccatgcccct tccactcaat ctccgaaatc atccacagac gaaattaggc |
| 28381 | tcagatggta actacccttc cccaggtgac agagctggaa gcggccaagc cagggttctg |
| 28441 | aattcatgca tagattagac ctaagccctc tctggataca gtgatagggc ctgactccca |
| 28501 | ccacccctgc aaggcccgtg ttggagtctc tccacacccc ctgcctccat ttctccctgg |
| 28561 | gcaaagtggc ctcagccctg gccaccaatg gtcagcagtg cacatcccac aaagcaggaa |
| 28621 | ggccaccctc ccattccctg ttcaggaacg gcccggaggc ctgggtcagc ccagtcccaa |
| 28681 | aggtagcctg gagccatacc ctggctttaa cctttctccc tagacccagt ggacaagttg |
| 28741 | taaacttccc tggcttcccc ctgaaagaat ctgcctgcca gtggttccag aatatcctgg |
| 28801 | gaaagagccc tttcaaatcc ccctgaacct tcttgacttt ccagaaagcc tcttctctcc |
| 28861 | gtcttactct gcccagggcc tgccggagcc agcttagtga gacacactgg cctgggagtc |
| 28921 | atgagaccta caccacagtc cttgctgagg aacctctttg ggctttggat tccccttctg |
| 28981 | taaaagagag atatgctccc tgctctatct gccccacggg actgtcacaa ggctaaaaaa |
| 29041 | agatgaaatg agagacaaga aagcaaatgt ctctcacagc tctactaggt aaggggttcc |
| 29101 | aagcaaggga ggggcccctc ctctgctcag gcatgggtga gaggggctgc agcagctggg |
| 29161 | cttaggaacc tgagtgggga ggaggatgcc atggaagaaa gacaatgctc tctacaacaa |
| 29221 | tgggtggaaa cagagcctgg acatggtgtc tcctttccca gaggctggaa cctgagcccc |
| 29281 | tacatttaac ctacaactct ggaaaagcta gggagagaca gagaaagacc cagcctttgt |
| 29341 | gacctgggga aacaggagta gccaccttta gccagtttgg tttggctcta acacaggccc |
| 29401 | tgtgtggagc aggccccagg ggagaggcca gagtaacaat agtacttgtg ccaatgataa |
| 29461 | gaagaactgc tgctatttac tgagcactta gtgtgtggca agatgggctg agagcttgac |
| 29521 | acaagcatta gactcactag aacttgctgg attggtagca tcctaggtga taaggagcca |
| 29581 | caacaggatt taaacccgag tctatctgat tccaggacct atggtcattt gtaaagtaga |
| 29641 | caagactcag ccctgccctc aaggggctca gtctagcggg cagatggacc cactacaaac |
| 29701 | aaggagggac cctgggcctt ctgagccaag aggaagaaga ggtctccagc ctgggggatg |
| 29761 | acagggcagg ggagtttggc cttatctgcc cctttctgct tgtaccagga agtcatggct |
| 29821 | gttacctcct ggaggccaga aacgcacctg tcttgttcgt cattggcctg gcacccagca |
| 29881 | tggagttgag aaaatgttgc cgagtgaaag aatgaaaaaa acagtgacgt tcactaggac |
| 29941 | tggcacctgt caccgcaggc ctgtgcccag accgagtggg ctcagcaggg ctagtggtac |
| 30001 | atcaagccct ttgctgtggc ctggatagaa aggaagcagg caaggcacag atgagatcac |
| 30061 | ctaaagggac tttagatcac cttgatctct aaggttagag atcatctagt ttaaccctct |
| 30121 | tgtcttgcag ttgaagaaac aggtcttaga gtggggaaga gaattgccca agaagaccag |
| 30181 | ctgagatctg agatcctaca tttaacttac aactctaaag aagctgggga aagagacaga |
| 30241 | gacaaagaca gaaacagaga gagagagaca gagacacaga gacccagcct ttgtgccctg |
| 30301 | ggaaagtgaa atagccacac tcgggatact gagcccaggc ctttaagctt gcaaatccgt |
| 30361 | ctctttccat tgtactctaa agcagcagtc cccaaccttt ttggcaccag gggctggttt |
| 30421 | cgtggaagac agtttttcca cagactggga tggtggtggc tgggggttat ttgggatgaa |
| 30481 | actgttcctc ctcagaacat caggcattag attctcttaa ggagtgcaca gcctagatct |
| 30541 | cttgcatatg ttgttcacag tagggttcac actcctatga gaatctaatg ctgtcactga |
| 30601 | tctgacatta gatggagctt aggcgggaat gctcgctcac ccgcggctca cctcttgctg |
| 30661 | tgtggctctg ctcctaacag gccatggact ggtactggtc tgtggcccgg gatatgggga |
| 30721 | cccctgctct aaagctttgt agtgcatctc aatattttcc cccaaaccta tagccctgtc |
| 30781 | cctttaagga tgctaccttg ctgatttagg atggttccag gcccactcag cggccaagct |
| 30841 | ggacataatc cagatcattc tccaaggtac atcagggaaa ccttttttgc agagtcctag |
| 30901 | atcactgggg ctgataggat gcagaaccct gtgccccggc cagcaccagc caggtcaggg |
| 30961 | ctaagcctag accaggaaac tgggtcagga ctcagcactc cccgggctcc tgagatcact |
| 31021 | ccctccaaca gaggccctct ttccctccct atctgtacta cctaccacct tgcttctgtc |
| 31081 | aacagtccta tcccaggctg ctattccagg tctgtgtctg tctccagaac tatccaggac |
| 31141 | catccccagg actgagaaac aaccctgcat ccctgcgttc tgcacagcgt catgcacaga |
| 31201 | gcctggcaca cagcaagtgc tcagcaaatg ttcgccccca gcatggggct tgctggctcg |
| 31261 | tgacatcttg agtgactgtg tttggcttaa ctgctacttg agtcccccag cagtaccagg |
| 31321 | cttcaggaga ggattcagtg tagtggatta agccctgagg actgaactcc agactaagca |
| 31381 | tcctgagact tgagtttgaa tcctgcctct gccaccaacc agccttgtgc ccgcgggcaa |
| 31441 | ctctcgcctc tccactttcc cacttgtaaa aggagcacat ctttgccatg ttgctgtgag |
| 31501 | cttggttatg ggtaaatgtg ctctggaagt actaagtcct acccagatga aattcttcct |
| 31561 | tcagaagccc ttttccttca gtcttttttt tttttttttt ttttttgagg tggagtctta |
| 31621 | ctctgtcacc caggctggag tgcaatggtg ccatctgggc tcactgcaac ctctgcctcc |
| 31681 | caggttcaag cgattctcct gcctcagcct cccaagtagc tgagattaca ggcatgcacc |
| 31741 | accacacctg gctaattttt gtattttagt agagaccgtg tttcaccatg ttggccaggc |
| 31801 | tggtatcaaa ctcctaacct caaatcatct gcccactttg gcctcccaaa atgctgtgtt |
| 31861 | tgcaggtatg agccactgcc cccagccccc tttccttcaa tctaatagct cacaagttca |
| 31921 | ataccatagt caggagagga gtgtagctcc caaaccctca aaatcctcat ctcgtcttgc |
| 31981 | tgtgttctca gcatatcacc ccaaatggag gaaaggacat aaccacaaaa atgaggagac |
| 32041 | aatgaaaaat gaaattaggg aagagaagat gcagtgaaag agacacgtga aatccacagg |
| 32101 | ccgaggcaga agaggaaagt gatggcggcg aaggggaggg aggtggcatg acaaggagac |
| 32161 | aaggcagttg cagacctgca cagagttccc actgggaaga tctaaactaa acacattctg |
| 32221 | ccgtgctgtg tcacttacga ctgctgtcac ctgtgagatc ccatttgatt ctctcaatag |
| 32281 | ccctctaagg tagatattgt cacccccctc ttttcacaga tggggaagct gaggcacagc |
| 32341 | tagtgagtgg cagagccagg gctagaactc aagtctcctg actcaaactc agagtttctg |
| 32401 | caacaccacg gagactccca gtctgcgtga gatacaagcc tcggtgttgt cagaagaaca |
| 32461 | aaaaagaagc aaagggtggg catgtccttt ggagctctgt gaggtgccca gagctcacag |
| 32521 | aggctgcctc agcaaaggaa ggtgtcagca atgggagatg gggctggaaa tgctgtctgg |
| 32581 | gcacagcaag ggggcctctg ggtgctagga aggggaatcc ccacctcttt cagggagctg |
| 32641 | tagaggagcc actgaaaagt tttaacaaag gagagataaa aagagaggaa aattcaaccc |
| 32701 | caaaagtctc cttcttacag cccatgcctc tacttccagg gaggccaaat gggagtaacc |
| 32761 | cccagtccca gaccctgagt cacttccctc cagccaagag gcccgtcacc ctccgaggcc |
| 32821 | ccacactgat gccaggaccc cacctagagg tgccggcttg atcggtctcc aggctgggcc |
| 32881 | ttgggatttt taaaagcttc tggaatggat tgcagttcca gccaagatga agaacccctg |
| 32941 | agaaagacag agggagacag agacaaaggg agagatagag acagagagag aaactgatga |
| 33001 | aagaaaacag atgtggtgag gagaagaaag cagacgaatg atgcgggagg gaaggaaaag |
| 33061 | aaatgagggg aaagcctcgt gtgggtggaa aatgcgggag ggagacaggg gaggaaagaa |
| 33121 | aggaaactgt aaggtgggag caagtcagag accgaagaag ctgctgtgac tcagtgagga |
| 33181 | ccctgtcttc tccctcaccc ggaaagcctc caagaagaac attccccgct gacataggca |
| 33241 | tggactgccc agacccggct gacgaatttc tgaaagggca cctgagccac acacctacac |
| 33301 | acgcttcccc tgattattct catctgcagt caggggcccc ggaagccccc tgtctcctgt |
| 33361 | gccctccctg tcccccgact ctcactcaac aaactggccc tcgccccgca gccaggcagc |
| 33421 | ctccctcccc aggtccctta gcctcagcct cccgccaccg ttcaacaccc cacctccctt |
| 33481 | tcacagggcc atctccaaag tcatgtcctt tttctcctga tctttctctc cttccaatgc |
| 33541 | caaaatccca cccacagacc ctcaggggga ccaatcaccc ctcccctctt catccccagt |
| 33601 | aaaccaaatc tcggtggctc ctgcggcccc ccgactccca cacagcgccc tggctgatga |
| 33661 | gctgggcctt cctgggctgc tttatttccc tgcagcccca taaaagcagc ttcattaaga |
| 33721 | aaaccacaca ctctgctgag ctgccagagg catccagaag ctggagccgc agccgctgaa |
| 33781 | tgaggcctgt gggccgggct gcctccactt cctgggactc tcagcgcacc cctccgccct |
| 33841 | gtgcccacct cgcctctgaa gccctcccta ggccctgctc agaaccctcc ccaccccacc |
| 33901 | ccgcagaccc ctctcccgct cctctgcttc ttcctccctc tcatgccaag gccaggtcct |
| 33961 | cccttgccag tcctgaaggg agatgtcaca aaggccgttt tcctgagaca ggccctgccc |
| 34021 | acactgggca gtgacccgcg gtgctggccc agtgtgccca agccctccaa gtccccaggc |
| 34081 | tgggagaagg aatctcagct ttgggaatgg caaacgtgca gggtgggctc acagaagcct |
| 34141 | cctcccgagg gcctgctcag ccagcaacag agtgctccaa gtcatgcatc tgctctgagg |
| 34201 | ccgagttcct tgtttataga gcacagaagc cattacccac ctctccggcc attggaaaga |
| 34261 | ctaaatgaat gaatatgcac gtagagcatt cagacctctg cataagaaaa agttccccag |
| 34321 | aaatggcagc gattattact attattattt attactggac tattgagcag tctgaatttg |
| 34381 | gtagggtata aaaatggaac taaaaaataa aaagtcactg ccttctacca gatctgtcaa |
| 34441 | aatcctccct gacacggtct ctccacagcg tcttgagcag acctcagcgt tgtctggtcc |
| 34501 | tgtccagaag ggcttcctac tccagtctgg catcctgttc acccctggcc atcctccttc |
| 34561 | cctcatgctt gtggctcagg atgtggagtg ggacagggac ccctgctgag gccctccaca |
| 34621 | tcctcccctg gtgggcagcc catggaaaaa ctgtcctcat atcactctac cccacttggc |
| 34681 | caatggagcg caaatagatg acttgccaca gccaacagtg gcaggctggg ctccttgccc |
| 34741 | tgctgtactc tatgggtctc ctgccagtcc actgccctgc agatgccact ggggatttgc |
| 34801 | atgccatgct gcccctcttg caggtatcta atcaccatga gctgtttccc caagaagtac |
| 34861 | cacaaaaaca ctacgcctag gacagaattc ttcccacctt tcccttgccc agtcttcttt |
| 34921 | cccatcccag gaaggtgggc tgggtgatgg ttggaggtaa cagggccttt gaggaagccc |
| 34981 | taggaagatg tctggctctg cccattggca gctttttaca gaatggggca ctgggccact |
| 35041 | ttagcctctg ttttgagcca ttgttgccac ttctagggca ccaggaaaaa tcccaatcaa |
| 35101 | attcctactc atcattaaca ttgagttagg gaggaagcaa cgaagaagtg gtaagggtga |
| 35161 | atctagaaac aatgagttgg ggacaggctg tgggcctgac cccaataaca ctaatcagct |
| 35221 | caaacctgtc cccagtgtta ccactggcag agtgaggagt ggtttgaact caacacagga |
| 35281 | gtctggggca gagcctgtgc cagtcagggt gattctgatg agagagagct ggaagctcac |
| 35341 | agctccattc agcacccacc aaaaaccagg ctcacaccca cattccttgc tgtctccctg |
| 35401 | ggacccgacc accaccctgg ttgcaccacc ctctcccaac ccccctcagg agctgggagg |
| 35461 | ccatggaagc agcgctgtgt agggagtcaa aagtcctggt aggtccaggc tcttcaccta |
| 35521 | ccacatgacc ttgggcaggt cctccaacat ctctgagcac catctttgaa agaggagtgg |
| 35581 | gcaacaatgc cggctctaca aggtggttgt tggaactaaa tgagattcca ggtgtcaatg |
| 35641 | ctttgtccct ggggagcact gggcccaagt gaggggccac tctgactgtt ggagatcccc |
| 35701 | acaagagatt cccctcccac accccacggc tcctacctgt tattgccacc gaagccgcag |
| 35761 | ttgtccctct ctccccagac atttcggtgg ccggtggcca gcagcatcga cagaaatgag |
| 35821 | atgctggaga ttcaggtttt caactacagc aaagtcttca gcaacaagta agtgtgggat |
| 35881 | ggggcaggag gggctgggcc tggacgggct gggagcctgc tcttctcctt gggctaccct |
| 35941 | ctgtttgggg cttaaaaagg ggacctacac tcccaacctg ccctggattg atcttcaaag |
| 36001 | accgaagaaa tcttgggctg gtctttgatc cccattttga tccctcttct tgtcttcaga |
| 36061 | atcccccagt tctcccagct gctgtcagcc aagaacactc caccctccta tcacctctgc |
| 36121 | tgtctccaac cccatcaaag cttcctgtct taaagactta aagctttaag tctccctcaa |
| 36181 | tgccacgctg gggtacagtt acccactgga gaggcgaaag gtggaggggc tgatgatctc |
| 36241 | ctccaagaga cactctgtag ccctgagggc aggcttgaca gtttggggtg gtggtttagg |
| 36301 | agtcaggcaa gcctgatctc agacactcag gtcagtcatc tactgtgtga ccctggaaag |
| 36361 | gttacataac ctctctgatt tcaatgtgct catgtgtgaa aaggacaagt atttacctca |
| 36421 | aagggcagct gtgtgaatta aatgagatag atattcactc actcattcaa caaatgttta |
| 36481 | ctaagcgtcg attgtgtatc aggtactgaa ttaggtgatg cagagggcgg ggtgcctacc |
| 36541 | ttcatggagc ttgcactcca caagtgaagt acacctgcca tacgagcgtt atcactataa |
| 36601 | ggtgttcaat aaaagtagtt gtcatccttc tctctgggcc atgagaagaa ttcagaagga |
| 36661 | tttgaacacg ctggaacagt ggctaagtaa tatcttgggt taaaaaatca cagccaggtg |
| 36721 | tggcacacac ctgtagtcct aggtccttgg gcagataagg cgggaggatc atttgatccc |
| 36781 | agtaatttga ggctagcctg ggcaacatag tgagatccca tctctttaaa aaaaaatcgg |
| 36841 | ttgctcttat acaagctgga ggtcatggct taactgtaac atgtccaaga aggtatggag |
| 36901 | gtgttagctc actgaggact cagaatgact caacagtggg aggagactac aaacaaaaga |
| 36961 | aaagtaggcc tcatcctaaa tcatactaat agaattaaag cactcctgat ctgagcagga |
| 37021 | gagacaagga gtccactgct ctgatactag tggcagagaa ttcctgtagg caccacccta |
| 37081 | tagtttccag gaggaaaggg actttaagtg ttaccttata acaaatggat gagagcctga |
| 37141 | aagggaaaat catagaggac atattcatcc attcatccat ccattgatcc attcatccat |
| 37201 | ccatccatct atcattcctg ttattcatcc atctgcctat ccatttgtct gtccatcaat |
| 37261 | tgatttatcc acccttcctt tctttcatcc atccttccat cctttcatcc atccattcat |
| 37321 | caatccatcc ctccatccat ttatcaattc atttatccac ccatttatcc atctatccat |
| 37381 | tcatccgtcc atcctttcat tcatcctatc catccactca tccatccatc catccatcca |
| 37441 | ttcacccatc cttcctttca tccattcatt catcaaccca atccttccat ctttccatcc |
| 37501 | attcatccac cacttaccct ttcatccttt ccattcatcc ttccatccac tcatccatcc |
| 37561 | attcatccat ccttccacct tttttctttt cctttttttt tttttttttt ttgagacaga |
| 37621 | gtcttgctct gtggcccaca gtggagtgca gtggcctgat ctcggctcac tgcaacctcc |
| 37681 | gcctctctgg ttcaagcaat tatcctgtat cagcctcctg agtagctggg attagaggtg |
| 37741 | ctcaccaccg tgcccagcta atttttgtat ttttagtaga gatggggttt caccatgttg |
| 37801 | gccaggttgg tatcgaactc ctgacctcaa gtgatctacc ctcctcggcc tcccaaagtg |
| 37861 | ctgggattac aggcgtgagc caccactttt ggcccatcct tctatctttc cattcactga |
| 37921 | tccatctatc gatccatcca ttctttcatt ctttcatcca tccttccatc catcatcctt |
| 37981 | ccttccatcc attcatccat cctttcattc ttccatccat tcatccatcc atccatcttt |
| 38041 | tcacccaact ttgcagtcac tcatcataca tatagtgaac aaatgctttc tgccagtcag |
| 38101 | acactatgct agtcactgga gatactgaga tgaggtattg aggcacagtc cctgccccta |
| 38161 | ccctcccaga aggctttttg ccacaggaag aggaaagaaa ggtgtgtacc tagaggcagg |
| 38221 | atgaggaaca ggctgctgga agacagcaga caactgaaag atagccagta ttttccagcc |
| 38281 | aatgtgctgt cttaggaggt agtgagctcc ttgccactgg gagagggtga gcaaagagtg |
| 38341 | gaccacattg tagaggggat ttctgagtca ggaaaggccc caccatatgg gctccaagga |
| 38401 | gtctctgatt ctgtgggttt tattaggagc tttcaaaatc tcagctgagt atggggcaag |
| 38461 | ggcatttcag aaatgctgtc agggccacag ggaggatgtt tagtgcacaa aggccttccc |
| 38521 | tttgcctctc atggcatcac accattcagg cagctgcttt tggcacccac aagcaaggtt |
| 38581 | ggtgagacac cccccaccag gggcccccaa ggtgaagcag agccttcttc cctggggtga |
| 38641 | gataccatga gggtgtgacc tatgaggaca ggagaaacag gaacaagtgg aaggctcaca |
| 38701 | cacagaccaa gtgggtgtga aaaaggaagg agaatcggaa gtcaagcacc agggagggca |
| 38761 | cctgagagcc cctgaaggaa cccaaccata ggtgccaaag catccaggag ctttacagct |
| 38821 | cagccactac agccctagct gtgcaggagg ggaaaccaag tctcagaggg gaacctgagg |
| 38881 | tcacatgggt agacaatggt agagccaggg ctagaatgca tgtctgttaa cttctcttcc |
| 38941 | taatccaact cccagaaacc aaaatatttg agcagtgatg gtggaaactg agggcatgga |
| 39001 | agacattgtt aaatcattta taatgaaagc caccagccta accactgaaa tgctggaaac |
| 39061 | acttgagccc atcaaaagac tgctacaaac aaatcagaag tatttgggaa atcgggaaat |
| 39121 | tgactcccat gcagtgaata tgttgaaagt tacagcttct attaggtgtt tttggttttt |
| 39181 | gttttgttca gagacagaat ctcactctgt cacccaggct ggagtgcagt ggcctagtct |
| 39241 | cggctcattg caacctctgc ctcctgagtt caagtgattc tcatgtcttg gcctcccgag |
| 39301 | tagctgggac tacaggtgca tgccaccagg cctggataat ttttgtattt ttagtagaga |
| 39361 | cagggttttc cccatgttgg ccaggatggt ctcgaactcc tggcttcagg taatagacct |
| 39421 | gcctcagctt cccaaagtgc tgggattaca ggtgccagcc accaaatcca gcctgtatta |
| 39481 | gatgttctta agtgccaata agaaggaaga cagaaagggg aatagttcct atcctaactc |
| 39541 | tcctcttctt ccctccctgc ccccatccaa gagaaggcag gaaaccccac aaggggaggc |
| 39601 | ccaggcctgg tgggagaggt tctggcattt ctttggaagc ctagagaatg cccagggcac |
| 39661 | tgctggctgc agagctgaga tgggaaagaa gaggtcccct tgtggagagc acaggcccag |
| 39721 | gctgacacag gccagcttgt gggggtcaga gtgggagaga ggtgtttgga atgatgtgag |
| 39781 | actcaagtct ccccatcctg gcatttgcct gggccaggcc agaggagcaa tgaggccact |
| 39841 | gccctcaacc cccacatggc ccagttcaga ccccaggctc cttctcatgg ggcagctgag |
| 39901 | tggaaggggt ctttggggtc tgcactaggc ttagcaatga gcaaagccat ggccactgct |
| 39961 | ggggacagtg cctggcacat ggcaggctcc tgattatttt gtggaataaa agaatgaata |
| 40021 | aatgcccctg tggtgttagg aggcagaggg taggtataca aggtgggaga gcctttgaga |
| 40081 | gggaatcgga gtggcccctc ttctctgaag gactcagggc actcaagggt gacactcagc |
| 40141 | atcacatgac cgatgcattt ggggaaattg agctaaaaga ggcatggagg agctgcctgg |
| 40201 | gagagtgggt cccaggacga gaaatgagcc tgatcccatc actgccatct cagagagaga |
| 40261 | gacttgtcct agaagcagag agtagcttgg aaactggccc ctcacccagt ggttctagag |
| 40321 | gctgccagga ggcagagaca tggtatgaag gaaggaggca tcctaggcag aaaccaggag |
| 40381 | acctccaggt ctgcttggcc ccgtttggaa caaagacctg tgtccaggaa ccttgggctt |
| 40441 | ccccatgaga aagaaatgtt cggttcagaa gattttgtgc atccagctct gcctgtccgg |
| 40501 | gacctctgag ggtccatggc ctggcctcca gcctcctgcc tgctaaggat gccagggacc |
| 40561 | ctgaataatt caggagccag gacagcagga gaggcctcgc agggcccagg acacctgaca |
| 40621 | cgggctccca ggggaaagtg atgaattatt gacaggattc tggtgcccag ttgccgctct |
| 40681 | attgtgatca gtctgtgggc ccatctgggc tggaggcctt ttcctgccgg ctaattacgt |
| 40741 | ggggatctta gctctgccca gccgcccagc ccctcgtggg gccagacagc ctcctgtgag |
| 40801 | gggtgtcctc tttgccatgg tgacctggat ggccctgtaa ggcaagtagt cagaggacat |
| 40861 | ggagttagcc ccagatcctt tgcctgacag ccccagggaa actgaggccc agagaggcct |
| 40921 | cttgtccagg gtcacacagc aggttcagga cagtcaggtc ttcaccccag gcctcctgac |
| 40981 | acccgggcca gtgctccttc ccacagaaca catggcctca caactccatt tctagggaaa |
| 41041 | tgactcagct gtctaaggag catatgagcc cacccttcct caatcgtcct gggccccact |
| 41101 | ctcccaggca gctcctccat gctgacccat gcagaggagt aagaacctac tatgtgtgca |
| 41161 | gccaggatgc acaaaggcca gctgcggcgg gcagggtcgc ctctggggtc accacaaggg |
| 41221 | ccagagccag gggcttctcc tacctcttcc tgtcccagct tcttcccaaa gaatatctat |
| 41281 | agaagacggg ctgagggatg gcatcctaga agcagtgcca gggcctttgt tttgaaactg |
| 41341 | ttttcatggc aagcactgtg tttttgctta aatggtatgt tacagacctg tagaaagagt |
| 41401 | caaggtttat aaaactgctt ttctttatac tttacataag gctgagataa tatcaattgt |
| 41461 | ccatgtcaaa aaatataatt tttactttta tttgagagag gttggggggt gaactgttag |
| 41521 | gagttaaaac cccccaagcc actcttggag gtgtggcaaa ttgattcctt taatcttgca |
| 41581 | agctcctagc gtcccagtcc caccctccag gccatagaca agctctggct gtgcgaggct |
| 41641 | gtgcacagct tgaagggtgg gggactgcct ggacctgccc ctgaagccca tcctgcaaag |
| 41701 | gagactcgcc ctgtgtaggc tctccagatg gccagccctg ctcattatta gggagggagg |
| 41761 | aggggctggc atccgagtgc cggtgttggt agaggaattt cacatgagca gtctcctcac |
| 41821 | cactgtccgg tggaagtcgg agggctatag cagaaggagc caaaaccaca ctgctgccag |
| 41881 | gaggtggaat ctcccttggg tcctgctgag tgagcccaca tctgtctgac tccagagccc |
| 41941 | aggctcctca ctgtctacac cgcttccctt tagggatgga attaatctgc atgtggacag |
| 42001 | ggcttggacc agggtaggaa gagtagggga tttgcctgga ggccaatctt gctcagcaca |
| 42061 | ctgtgtgatt aaggcagtgg ctgaatggac taccagtgac agccccatca ctgtcaccac |
| 42121 | caccggagta tctagcaggg acttaaaagc acatgtcagg gaggttgttt cagggattcc |
| 42181 | tcctggaagg ggcgctggac aaggtctctc aggttcttcc caagtataag atctgagatt |
| 42241 | caggcaggtt aagcctagaa ggcaccagac gcctctgtga gcacttgcag ggggaatagc |
| 42301 | tccaccctgc cccctgggag tgtcttgtca cattgcagca cctctgcgga tcctggggag |
| 42361 | ctgccttggc tgttcttagg catctaattc tggagaaaga tgtgcctgat cgccccacgc |
| 42421 | tcaacaggtg ctcgacaggt cctaggggaa tcaaggcagc tgaatagcca tccacaaagg |
| 42481 | gtaatagtag agcagggatt ctcaaagtgt ctccccagcc agcagcttca gcatcacctg |
| 42541 | gaaacttgtc agaaatacac attctcaggc cctctcccac ccactgaatc agagccctgg |
| 42601 | ggtcggggcc agtggtgtga actgaagtcc ggtggaccca gtttggtgac ttcacattag |
| 42661 | aagcttgaag ttggccatgg cgggagtatt tatatctcag aaaccagcaa atgctacaga |
| 42721 | tgagcacctc tcctctccca ccagtgacac attttccagc atatccacag aagaggatat |
| 42781 | cccagccgtg catgttttca caagccctcc aggtgattct gctcatgctg aagtttgaga |
| 42841 | accactgatt tagaacaaaa aggggtgagg ctgcaaaaag atgagtgtat tttttcgtgc |
| 42901 | ccgtggtcta ctgttagaat gtctacatgg tacggaagct aaaagtcccc ttccctcttc |
| 42961 | attttataaa gaccaaattg agactcaggg gcagcagctc cagggctcct ggcccccagc |
| 43021 | ccagcacttc tgtctctggg gcactgcctg agctgggaga ggtgcatgca gctatggaag |
| 43081 | aaggcttcca tgggctgctc taagggccca gaagcccagt tcggctttag agtgaaggag |
| 43141 | tggcgtggtc agtttcatcc tcagggaggt ggggcacaat ggtggttggg gctctgagct |
| 43201 | ccaaagggga gcatttcata tccattcctc atggctgccc ctaccacttc ctcccctcac |
| 43261 | acagatggga agatttttaa aaaatcaatg ttcaccctcc acagacctca gggtggtaga |
| 43321 | gacatgaagc atgtctgagt cagaattcat ctgatacctc acctcaccca gatctaccat |
| 43381 | taattagctg tgtcccttcc ccttccatgg cctcactgtc ttcctctata aatctcaggc |
| 43441 | agcatcagat gatgcccaag gtcccttcca gctctcacac gccctggatg cttccctccc |
| 43501 | ctttgtgcct tcagctagaa atggtgtgtg tattctaatc cactctatgt ggaagcacca |
| 43561 | tgtaagaacg tctgtctgag ttccctgttc tctcccagag caacaaacag ccttctgact |
| 43621 | gtggggtgca atggggttga agtcaactcc atcagcattt attgggcacc cactgttgtt |
| 43681 | cattaattca gccagcagat attgagatct ctagtgtgct agaaatgtca aacagaggct |
| 43741 | agaataaaaa gcaccaccca tgcccttgag aggttcacag tttagaggca gtacatgaat |
| 43801 | cacgacaaaa cggactgctt tggagtgctg gctgtgtgct gggggctttg acaagaacac |
| 43861 | tcgcagatga tctcattcag tcctccaaca acaactctgt gaagtagggc ttatcagctc |
| 43921 | atcttatgag aaaaccgaca ctgagagagc ttaaggaagt tgcccaggaa gcaggtagct |
| 43981 | tgctagtcag tgtcagagct gggttcagat ccctgtctct ttgatgccag gactgtgctg |
| 44041 | ttaaccaaag cattgcaccg cctctcccct gctgtgcagt tccatgggct ctgccatcac |
| 44101 | acaggttcct gccatccagg aacttacagg ctgcagatgt ggaatggatg agtgagtgct |
| 44161 | gttggtgtgg gctggaaacc ttggtcatgg ttaggcgggt agaagccgga ggagctactt |
| 44221 | gtccatccag gaaactcagg tcctttccca gcctccacac tgagcatctg gaagcttctc |
| 44281 | tgcaagggct cagctaaagc tggatttcat gcacctttcc ccgcagtctg tagacatccc |
| 44341 | ctaagggtgc tcactgcccc ttggagctct cccaaggaaa tgggcctccc acaaacaacc |
| 44401 | atccacagtg ggacatgctg ccctggctgc aaccagtcct ggctcctggg ccaccttctc |
| 44461 | cagcccagcc cagagctgga gcaagcccac ctgagtcctc cccaagcagt cacagccctt |
| 44521 | gggatgtcag tcttgctcct caccctggtc tcttccatgt taccaccgtg ccccctctgc |
| 44581 | catccccagg ctcatcggga ccttccgcat ggtgctgcag aaggtggtag aggagagcca |
| 44641 | tgtggaggtg actgacacgc tgattgatga caacaatgct atcatcaagg tgggtatgcc |
| 44701 | ccacggagtt cctggacttt cccatatggg gccatctggg ggtctgttct ccctgcctca |
| 44761 | cacatggggt ggtctgggga atgcctctca tgcatggcga ggtgtcgcag gaggaggaga |
| 44821 | ctcaggtcag actctgctgg aatggctcaa tctgtggcca tggctggagg ccctgtggca |
| 44881 | tggcagggtc tgctgcccca cagtaggcac ccctgccctt cctacggtgg gaatgcacca |
| 44941 | actggtcctt ccatttggac ccagctcagg agtcactaaa gaggctcctt ttgtcatcca |
| 45001 | aaggccagac tgagccctgc tggcactcga gggcatgacc ttcactctgc acatctggct |
| 45061 | cgggtcctcc ctgggagggc agggacctca tttcctattg tttgtcacat cccagcactt |
| 45121 | ttgcgtgagc acgcgtgcac tagtgatgca cagtctagag gcacctgaca catgttctaa |
| 45181 | caaagaagga agcaacccta ccaggacagc ctggccccag gctctgctct gattcttcag |
| 45241 | tcctcttgag ctcagccgtg gccactcatg ggcagttggc atgatggtga ggaacaggga |
| 45301 | ccctgagtat gaatcttagg ctgctcacta actgtgtgac ttaggcaagc tacatatcac |
| 45361 | ctcaaagtga gcacaattac attatccacc tcccaggact attctgagga ttaaaggaca |
| 45421 | atacacagaa agtacttagc acagatatgc acaataaatc tataatattg ttagctatta |
| 45481 | tttcctgacc tcagtttacc tatgtataaa atgggactgt gccatggtcc cccagtgggg |
| 45541 | tcctgtgtaa tatatggccc tatgtagtgg ccaagagaaa cagcctcaga agccaggact |
| 45601 | gcagccacag ggagctagaa cagaaggaac cctcttctcc catgggcagg ggtggcaggg |
| 45661 | agggcttctt aaagttaccg gggtctcagc caccacagca aggggagaag gggtgcagaa |
| 45721 | taagctatgt atggacaccc atgggaaggc gggctgggag gagaacacag aaacctggat |
| 45781 | gaagagtgta gtgtgggaag tgagataaga gaattgggga gtgagcaggg atggacagac |
| 45841 | agcacagccc atgccctgga ttttcagaat cagacttaag atgtcagcag aggaaaggac |
| 45901 | tcacggatct cctagcccac ttgccaccca tctccgctac ccattgttat gaatgggaac |
| 45961 | aatgaagtcc tggatgggga atggattcgg ccacagttga cagcagggcc agcacggaga |
| 46021 | cccaggactt ccaatgccag agaccaccat tttcccataa caacatactt ggttccacca |
| 46081 | agagggtccc atttgttcca gaaaggacat ggggcttgga gttaggcagc ctgggctcag |
| 46141 | atcccagctc cagtacttcc tagctgtgtg acttaaagca agtaacttaa cctcctgata |
| 46201 | tgctaggtaa ggtaggttgc aatgttgaaa agatcaaatg agtgtacatt aaagcatctt |
| 46261 | agcatgatgc ctagcacagt gaggattcag aaaatatgtg cacctttccc ttcccttggg |
| 46321 | aaatctaagc ctgggtgctg gagcatccaa gcactgagtg agggccgcct gtctggggca |
| 46381 | caggaccaag tcacctctag accagtgagg aagggtgatc cctgtgcact gggggggaaa |
| 46441 | ctagagctgc aagaaagtaa tggctccagg acgcagagca ggaagcccaa tcatgactct |
| 46501 | ccactgctaa gcctgagccc ggttgagtgc tctacttttt gccagaggaa aaccctaggg |
| 46561 | cagctcccaa gattccctcc ctctccaggg taggaagggt gagtgtgagc ctgggccctg |
| 46621 | ggctcctctc ccggaggcca ctttcagctc attctgtcca tttccaacaa gccgatttct |
| 46681 | ggcgggccgc gcctcatgcc tgcaggcagc ccttgttctg aggagaggag gtggcctgat |
| 46741 | catggggatg ctgaacgaca ctctcggtta tgtagacagt ggactcgggg ggtgagtcca |
| 46801 | ggctcagttg tcctgggcag gccaggcccc tccaccttga gcaccaggga ggagtggaac |
| 46861 | caccagcagc gggacctgga gccaggtacc agtaagctga cccggtctgc acaagtcagc |
| 46921 | ctttcagagc ctctgttttc tcatcagcaa aatggggcag aggggatcat accatcctga |
| 46981 | cctcctccag tgaggcaagg gtgtggaagc gctgtgtaaa caccaccaag cagccacata |
| 47041 | tacggggtgg agattgctgt caccatccca gctgctcacc accgcctccc tcccttcaga |
| 47101 | ccagcctgtg cgtggaggtc cggtatcagg ccactgacgg cacagtgggc tcctgggacg |
| 47161 | atggggactt cctgggagat gagtctcttc aagaggaaga gaaggacagc caagagacgg |
| 47221 | atggactgct cccaggctcc cggcccagct cccggccccc aggagagaag agcttccgga |
| 47281 | ggtaacaggc aggacccctc tggctgccca ctgctcccaa gacacgggga agagacctgg |
| 47341 | ggcctggtcc tactgacagg cctctctagg cctagcbggg ctcagagtac agggctgagc |
| 47401 | ttctggagag acatccaagg ggtgggaaga tgtttctgta gccccccacc cagccgtcca |
| 47461 | cccccgaggt cactgggcag ggagcaggag actcagatgg agctgcaagg ccaaggcctc |
| 47521 | cccagtggcc ctgagggagg tggagctcta acacagggat ggggctagat ctcctgcctt |
| 47581 | tctcagagaa ggggagttgg ggataggagg gcccctggcc tctctggttc aagacccagc |
| 47641 | agtgtccacc aggtgccggc agcctgacct ctaccctggc ccagtgagga ggcccaagag |
| 47701 | agggcagctc ttcctgccag agtgaagcca aagatcctgg ctgggccctg gcctttcttc |
| 47761 | ctcttgagaa gggagggtac ccgggaaccc ccagaatcca gcgtcacgcc ctgcaagtgt |
| 47821 | cctgccacct atggatcaca ggaagctgga tccaggacag ctcattccac gtgcactatt |
| 47881 | tttacaaaac agaaaatgca attgtattac tattagagac caaggggaca gaatctgggc |
| 47941 | tagtctagta agatgttgtc catgggttcc taagtcacta ggaattatgt gttaaatgcc |
| 48001 | agtaagtcaa gggtgcatct gaaggaccag ggtgtgtttt gagaagggac cctccgtgcc |
| 48061 | actggaaaca tatccctgta agctccttcc acgctttcct ttccaagtaa agtttactca |
| 48121 | gtccctctgc tgaagaaacc ataggttcta aattagtgta attgaactga catactttta |
| 48181 | tgggacaaat atgttttctc ctttgcactt gaatgagttc acaccccctt aagcacccct |
| 48241 | cacacacagg tgcatgagtg cacacgtgtg cacatacaca tacacacaca cacacaagct |
| 48301 | tcagaaaccc tgggagccag atgagtaata gtaacaaggt caaagtgacc aggcctgcaa |
| 48361 | caaacatggc gggactgtct actccaggcc agccacgggc atggggcagc cccaggctag |
| 48421 | cttaaagcct gtcccctcag actcctggct ctttagcaga aaacccaggc ctgagtccta |
| 48481 | gctctgcctc ttactagtcg tgtgaccctt ggcaagtctc tgaccctctc tcctcacctg |
| 48541 | caaagaagga catagcaagg aaatccccct gccctgctgc tgggagagcc ggagggatca |
| 48601 | cagaggaaca ggtggcaatg gaggtgctga gcgctgccca tgtccaggct ggtgacagac |
| 48661 | aaacaggttt cttgtagcac aacaatgcaa agagtcagga atcgggttgg aaattgtgag |
| 48721 | aagaggagca gtgctcagac ggggagtgaa gggatgctga ctcagtgggc accacctggt |
| 48781 | cctcctcgac tgtctccatt cagaaaagag gttggcaggg ctggtccaga aaccagaagc |
| 48841 | cgggctctaa gaaagagctt ccagagaaca agatcggaag ccacacaagg gccatcagtc |
| 48901 | acagggaaag gaatgctgac cccaaatcag gagagctaag gcccattaag tcccatcttg |
| 48961 | actgtgccac tcattggctg agtgacactg ggcatgtcac cagcccctgt aggtcagtga |
| 49021 | caggaatggg ttcagcaagt tacatctggc tcccctccaa ctctgaggtc ctaagggacc |
| 49081 | catggatgct ccggacctgt gggtcacatc catgggaaac aacatcctgg gagcccttag |
| 49141 | cagccacgaa ggcaacctcc ctggggtggc gtagcaacac agagccagtt tctcactcag |
| 49201 | tcctaagaga gtgggccagg gtgctgatgg gggctctgga gagcttagag tcccagagag |
| 49261 | ccctaggcac caggaatctg gagataagag ggctcccccg acccttcctc acagcctggt |
| 49321 | ggcttcccca cctctcccca tcttcgtgtg gcccctccca gggtagcagc aagaagcggg |
| 49381 | agcaaaagga ggggcttcac cccggactgg gaattgggag agggtgacag ccgaagccag |
| 49441 | gcacccccac cctgcattgc aggggcagtg tgcaggagca cagtttccct gctgccactg |
| 49501 | gggctgccag cccaggtttg agagcacatt ggggacaggc atcgctgcta caccttctcc |
| 49561 | cgccaggcct agccatgcag ccagcaggcc tggttgtgga aaagaggggt tgagaaaaat |
| 49621 | tctagagatg ggccatttgc tggtgaggag aaggtggagc gggttcaaga acttggggtt |
| 49681 | ttcctgtagc ttaatcctgg ctgcccatat ggggccattg agttctgggt caaggagtgc |
| 49741 | tgaggtgagg agggggacct ggaagctggc cccgcagccc tagatgttgc atctcaccct |
| 49801 | tgtcacatag tgtgggttct gggaggaagc cagagagctc tccagaaggg acttggccaa |
| 49861 | ccttttatca ggaaaacacc tactccttaa agaggacaac accggggaag gggtgtcagt |
| 49921 | gcctcacctc tgaccccgtt aggagcccag gcaggcttcc cctgcatctg ctccctgccc |
| 49981 | tccatcctct cctgggaagg ccaatcccct tatagatcag ggtattcaat aaccacagtt |
| 50041 | ccctcttgtt cctgctttag ccacaatgag caagaggaaa atcccgttgc tggcaagcag |
| 50101 | cagtgtctca ccggccatct tgaccgttag ggtccggcgt ggggatcagc cgctccctgg |
| 50161 | ctgatggggt gaaatgaagg cctgctgggg gctgcgggga ggtagactga gtgggcagga |
| 50221 | aacagcctca gcccagacag gccccgggca gcccaggctg gaatcttcca cggatggagg |
| 50281 | ggaggctgat gccaggagat cctctgggca ctcctcacct ctccctccag ggcctgggtc |
| 50341 | caccccccag ccctgccctg cctggcctgc ttctctggga cttcacccac attcatcctg |
| 50401 | tcctcactct gggggtcaga tggttctaag caggggcagt gtggacctca ggcctcagct |
| 50461 | gctgtgacac tcactcctaa gaccctaaga atctgccatg aagttacccc gttcctcctc |
| 50521 | agggaatcag tatgggggct ctgcctgaat gaccaccaac cccaccgccc actgactctc |
| 50581 | tgccccaacg attccacctc ccctaggccc tggtcagccg catgccctct gagccactct |
| 50641 | gcccacttct ctagttcctg ccacgaagcc ctgatttctg ccggcttttt gcacaatgcc |
| 50701 | cccggtaatg tgccaggaag ctgtgctgtg tgacagagca caggctccac tcacagctct |
| 50761 | gctattggga acccccctcc ccatttgtga gatggggctc aaggatgcct cacagaagtg |
| 50821 | ccaggattga gtgaggtgca cctgcgagtc atccacccct gtgcctggca tgtggcaggt |
| 50881 | gctcagccag tgttcacttc cttcctcttc actgactcca tgttaccctg atgtcaactt |
| 50941 | ctaccccgag cagcacctga ccctcttgtt caggtgctgt ccaagcacct tctcagctct |
| 51001 | tgctccccac cctataccaa gggctctgca gaagctgccc acacaggagc cttactggcc |
| 51061 | caggggcagg tatagggagc tcatttactc aaagttcccc tcacctcccc aggctctcag |
| 51121 | tgttgcagag atgtaatgaa tccctaacct catgggcgct ccactctcag cagcacaaaa |
| 51181 | tcagtgttcc agacccttgc atggcagcgt atgcctgccc tagtctctgg agagaaagtg |
| 51241 | acttcggccc tgaccacact cacatgcaca cacatgtgta cacaagtgcc catgtgtttg |
| 51301 | cacacactca catgcactgc atgacaccag ggaggactct ggattctggg ctctgctgtt |
| 51361 | gatgctgtct ttaggagtca catcttagag aggacaaaga aagaaatccc agctttagtc |
| 51421 | ttgcagctaa actgtagaga cctgagcctt tcctcctgag tcccagtatt ctgcgactat |
| 51481 | ctcctcttct cattttctcc acctggcctg gctctcctgc cctccacgac ccccacctcc |
| 51541 | ttctgctgcc caaaccctct tctgctggtc tcctctctgc tgggtctcat ctgggaggag |
| 51601 | tttggggcag gagccacttt tctcattctc cttattgatc attcttccac tccagtggag |
| 51661 | gcctgcagaa gccaggtaac ttcctcctat gctggggcca gagggcagtg gggcacgtgt |
| 51721 | gcatggtggg gctctgagac agaggggcag agagtgggca tgcagaagtg tgtgcatgtg |
| 51781 | gggccagtac atgcagcctt accccaagag tgtttttaaa tcggtttcca cagcccctag |
| 51841 | agagctagaa aatcctctgc tgccttcctt ctccaggctg agccccagag ttgcagcagc |
| 51901 | tcccaaagct gctcagatga gccggggcag ccgggcgcac tgggattttg tgcttgagac |
| 51961 | acattcctcc tcctatgctg tgagctcttc tccgcttagt agtctcagct gatgtgggca |
| 52021 | gccgaggcct ggctgatgtt aacacctttg aattacagac tgacctgctt gcccaacgta |
| 52081 | aaggttagct ggccagcgct ggactgcagc tgtgctgtgt ctaggccttc aggtcttgag |
| 52141 | ccatcaggat atgcagtcaa gtctacctgg gcaaggcctg tgccagaaca gggtgtgagg |
| 52201 | agaggaataa tttgctaatt gttattcact ttcctgtctt catcctcatt gccacagcac |
| 52261 | tgggaaagca ttgagagaac attccagaaa agttttctgg aagcctccct aaagtgagat |
| 52321 | aggggggccg tttttccctg ctctgagccc tggagtggta gctcacttac cgccccacct |
| 52381 | acacccctag aactgccccc aaccacccgt gtgcactcca tagcaggacc cccagccctg |
| 52441 | cctcaccctc acagagcagg cttagcccac tgttccccta gaggccccca gagcctggga |
| 52501 | gctcccaccc cattggaggg gagcagggga gcaggggagc cggtgggcag aggagcaggg |
| 52561 | tggcccaggc cgggagggtg gccaggctca tctaaccctg tgttccctga ggaagctgcg |
| 52621 | acccacattg tggaatcatc agatcttagc ctggtagggg cgatgagctg aggccctgag |
| 52681 | gtatcagagc ttggggttgg aatagtggcc acccaggccc agcactgtgg gcccctccca |
| 52741 | tctcccccaa ggcagaaccc agggccatgg gacccctttt ctgcagacct aggcttgcta |
| 52801 | ccgtgcgaag ctgtggggtg agaggtctgt gggacaagga ggcccccggg gagcgtgcag |
| 52861 | gcccgtgggg ccggggctga ggccagtgtc tctggtccac agcccctcac acgtgtcccc |
| 52921 | ttgtctcctc atttcttccc cctactcagc aaaggcagag agaagaccaa gggaggcaga |
| 52981 | gatgacgagc acaagtaggt gtcccaggcg agggcagacg caacagcgtc tctggggaga |
| 53041 | cagaggcctc ctccccacag gctgtggagg gcgggatggg ctcggctgag agggctcagg |
| 53101 | agtgggctgt cgtggtagag ctggcacggg tcatggaggc ccagggaggc cttttcacct |
| 53161 | ggccacgggg gtgagggatg aggaggggtt agggtcgcgg gggaggtggc cagaccttct |
| 53221 | ggtttccact ctgggctctc gggggtgacc atcctcctct ccgtgtcttg ttcctcctcc |
| 53281 | actgttcagc ccccatcctg tggccttcgg gcttccctgg gagggagggg acagctaaag |
| 53341 | gctaagggga gaggggcatg aggacctcag ggatccctct cccaacaggg gcgaggtagg |
| 53401 | gccaggcagc tggaggcata aggaggagga actctgggta ccctttgcag ctgcaggtcg |
| 53461 | tgggtggagt tggagacccc cagaaagctt aggagaggcc accatttggg cggccctctc |
| 53521 | tatcttcatc tccccaaaag gcttcctgga aaaatgaggt cagggtgctg tctggagagg |
| 53581 | acaggagaag ggtcctgcag gtgggagggg ctggtcacaa gggtctggaa agattcgaag |
| 53641 | gctgggagtt gtgaatgggt cttgtaggca cccctagaag cacactgaca tctggaggac |
| 53701 | tctagcatta cgggatctca taagggcagt ggtagccaag gtggaccata ctggaggagg |
| 53761 | cctctggtta acacctgctc ttacagatga caaatctgtc tcagaacagg ggcagagctg |
| 53821 | gaaccagaag acagggaagc tgacttctga cccagagctc accatagacc caggaaattt |
| 53881 | agagaacttg actgtatcta aatttaatct aattctccaa acataccaat gagagctgaa |
| 53941 | aagccaggag tgtggtcttt tttatcttcc agataagcaa cctgagcccc agagatctta |
| 54001 | agagatttgc tcaaaactgt ggcctcaata tattaagaat tagttcatct gaagatatca |
| 54061 | tggaaatatc aggattgtgt gttgaggggt ctgaactgat caacactggt gtgggcttgg |
| 54121 | gatatccact ggcattaaga tcctggggaa ctcacagcct cattcattgc ttcaaaaaaa |
| 54181 | ggtatgagtt ctaactcgca tttgttacgc acaagcaaaa gcaatgatga tgcagtgtta |
| 54241 | actctgtagt gatggaggaa atggcgctgt gtaggaagag ctccagccca gagacctgaa |
| 54301 | ggatggagga gtttgccagg ttcccagtaa gggaagacac gtaggcagag catgtgtcaa |
| 54361 | ggctcagagc cagggaactg aatccagggt gggtggcgat gatggggaat gctgagctgg |
| 54421 | ggagtcctct tagggagtcc tcaagggttc aggtttctcc atagatgctt agatgtaaag |
| 54481 | ggcatatgaa tgagatacaa gcagcctgtc catccccagc ttctctgcct gagatcagcg |
| 54541 | atgctctaag gcccttcttg atgcccagct tcccagtctg tcccaggcca gacccacagg |
| 54601 | gacacagact ggcctgatcc ctttgactgg ctacagttgg agtaagaggt acctcacagt |
| 54661 | gccagcacat agtaggtcca ccaaaatact ggtttcctag cacttctctg tcctaatttc |
| 54721 | ttaccatctc taattagcac atgagataaa gtaaactggc atatagtatt gttattatta |
| 54781 | ttatgtgtag agcaatagga ctattgaaag aataggaaaa tgagatttct aagaagagat |
| 54841 | tgaacaaatt taaactcttt agcctggagg agagaaaact gtggagacag atttcaatct |
| 54901 | ctgaaatgtt aatgtgtggc aaagctggtt ggtatctatc tccactgaga agagataaat |
| 54961 | ggaaataaat ttaagttgaa gttaagttga agtagagaaa caagattcaa cccacgaaag |
| 55021 | aactcatagt gtgtgacatt ctgggatagg ctggtttggg gagatgagaa aacacccatc |
| 55081 | atcttccatg atgctgcttg cttgagcctt gcaaagggct gggccgccag caagaactga |
| 55141 | agagccagct tccctgacaa tcctggggtc aggacaagtg tgtgtgggtc ccccaagcct |
| 55201 | tctggtacaa cgtgggcaca tgtgcaaacg ggccagtttg gagacagggt ggttcttgta |
| 55261 | taaagggtca gcctatcctg cccacctatg gaaagctatt caaaaactaa ctgacattca |
| 55321 | acacactttc aaagacacct gtaaagacca aaattatgaa attccctgtg ccttggggca |
| 55381 | tggaaaattt ttaaaataaa cccatttagg ggcgcttgga taacatgctc cgaggttttg |
| 55441 | aaaattgggc tgtttgagca atgcaaagaa ggaccacaga ccctatttct catagacagg |
| 55501 | agtctttatc ctgattgatt acctgaggcc tgagctaatg agcctagtag ttccagttga |
| 55561 | agccagtcat ggggcagaag ccctgggcag tgaatggact cgacctgcag ctcatttatg |
| 55621 | gtcaggtctc tattagcttt cagaataatc cagagacctg aattaatgaa acactcgggt |
| 55681 | cactaaattt agtttggtga atgttcccaa gtcattatga atactaagct ctacctagga |
| 55741 | ccctgtgtgc accacacagc aacacgcttc taaatctggg ccataaaatg agcggagaaa |
| 55801 | tcatcagatt tatagtttac aataagtgaa ctaattttag catttttttc ctctagagat |
| 55861 | aaataccagt ctagattgta ggtgcatttc attctgacca tggtgaatgt agccacagga |
| 55921 | aactcaaacg gattctaaat cctcagaggg tcctgggata ctggcctccc cttggctctc |
| 55981 | acttctcaag ctttaatacg cccaagaata aggagccatt tgattgtaaa gtgagttttc |
| 56041 | actgagttga ttattggctt gttttctttg tctgtttctc accatatcct gtttttggta |
| 56101 | attgtagaac tcaactagac caaatgcaga attttacttt gaaaacaaaa aaaggccagg |
| 56161 | acaacggaca cctcaacagc aaattacatt ttttgaaatc taagtctttc agacaaatag |
| 56221 | ataatcttca aaattccctg attaagttga catttatttc aaaactctcc tttacagttt |
| 56281 | gccaagagaa gtaggcatac tgctttctgg gaactggtgc tgcaatcagg cagaaaggct |
| 56341 | ttttctatag tgaacttctg atgtgttact gatcagaaaa ttacaaaggc tagtggcagt |
| 56401 | gatgacatca tgctgtactg atcacaattc agattcattg aagagcaagt ctaggagaat |
| 56461 | cagaggtaca gagcctgtag taagaattct ggaaattaca tccttcacta cacatttctg |
| 56521 | catttttaat aaagggacaa agacaatatc cttttgagat attcccaggc acacaggagt |
| 56581 | gctaccagta ctaccacttc agacagctaa aactatgcag ggttggaagg gagagatttc |
| 56641 | tcctttcaat tgcttcaagg tgtagtagag atagttggac aagtatagtt tttgtttgtg |
| 56701 | tgtttgtttg agacagagtc tcactctgtc gcccaggctg gagtgcagtg gtgcgatcgt |
| 56761 | ggctcactgc aacctccgcc tcctagttca agcgattctc ctgcctcagc ctcccgagta |
| 56821 | actgggatta caggcatgtg ccaccacacc cagctaattt tagtagagac ggggtttcac |
| 56881 | catgttgacc aggctggtct tgaactcctg acctcaagtg atccacctgc ctcggcctcc |
| 56941 | caaagtgctg ggattacagg tgtgagtcac cgcaccggac caggacaagt atagtttttt |
| 57001 | aaagcctcaa tcatttcttt caaatctgtt tgtgttaaga aataaagtga ctttcaaatt |
| 57061 | caagggccat aagtgcccca gggatgcctc aggtcctttt ccacctgggt gagtccatgg |
| 57121 | gaccagcctc tgaaagccac tatttcttgc taccttgcac tccccccggg actcaggcag |
| 57181 | cagggccaga tcccatccca gcaggccggg cagccggctt ctccaggcag ggcctgcttc |
| 57241 | taacctacca tctcagagca cttcccctct ggggaagtgg ggaaggggca ggggagaggg |
| 57301 | aagtctgtgg ctggagcagg ctgcaatggc aaaggctaac tatgtaggtc acacatgcgg |
| 57361 | aagggccaag gactccaaga ataacacagc ctaggaatgg ccaagaagta atggtgcaaa |
| 57421 | gtcaaacgct gagccctgca ggagactcct gggtaattca ggagagacat agttgagcag |
| 57481 | cacggctggg caaaaaggaa tcccaagcac tgagacagga agtgacccac gaggaggccc |
| 57541 | acaaaaacta cacttctgaa gctgggccta tggcaggggt caggacagcc agcacccctg |
| 57601 | tccttggggc cagcaggtgg ggcaaaatcc cacaggatgc ttcagggcaa gccagccagg |
| 57661 | gtggtccttt ccccaccatc acacgattat ttctggtggg ttcattgatc tgttcaatgt |
| 57721 | tatgtcacca gcaatttaac atgcacagca gtcccttccc aaatgtttgg gtgctcaggt |
| 57781 | tctttttgaa tgagcccctt ctttgtaaac atgggtatga tctgtgagat tccacagatg |
| 57841 | acagcatcct gatctgtaaa ctatgctggc acacagacca tacctgtacc tatgggtgcc |
| 57901 | agccctgggg ccttttagct aaaatcccaa atggtcagga atggatggga ttcttgccca |
| 57961 | cagaaaagtg cagtcctacg gcatcgaggc aaaggacctg agatgcagta aaaatattgc |
| 58021 | tggcctagaa cacaggagct ttctgcttca atcccagttc tgccactcac cgtgtgacct |
| 58081 | cgcgattatt gtcccctctc tgagcctcag tctttttatt ggttgaatga ggagaagtat |
| 58141 | gtggccctca gaggattgcc aggaagatga aatgagcaga catctgcaga cattgcagac |
| 58201 | atctagaaag gcctttggcc ctatgtagtc tctttttggc ctgtatgtgt gtgtgtgtgt |
| 58261 | gtctgtgtgt gtgtgtgtgt gtgtgtaact cacctccccc atcagaaggg aggaagcttt |
| 58321 | tgaaaataat tccaaaggca tcagctttga ttttagagcc tctttctttc cctttcttct |
| 58381 | cattgtcgta tttcagatgg tatgctactg aagagtgcag acacatcagc cttcttccat |
| 58441 | tcctttttag gaattcaaag aacatgctaa tgttccctaa attgtgagct gctgccacgt |
| 58501 | gaaaagggtg attctcaatt gctccctcac tgggatatga acgtgctttg tcctgcatat |
| 58561 | gaacagtaaa gaaaggtcct ggggttggga tagggccagg tttggggaat aagattggcc |
| 58621 | ccacaatcct gaggagaggg gcttgaggtt tctaggtcat ctgcctgagg acagaaaggt |
| 58681 | tttccccaac ctcctattgc ccagcataaa gaacaaggat ctggggtctt agaaaccata |
| 58741 | gtcaagcctc cacagggaga tgtgtgaccc aaaaagggtg gactctgctg taagcgagct |
| 58801 | ccaggttgga gcctacacct ggctccacct ggacctacag gatgatgggg ccatacccag |
| 58861 | gaggagggag aacgggaagt ggagagagtc aggtatccac tcatgcaata tggatggggt |
| 58921 | aatggaacac tgcactttac cctctgctga tcctgctcct ggggcttcct ggtgccagga |
| 58981 | accacaggct cggctgcagg gacatcactg aaggacagtg aggacccctg ccccttttcc |
| 59041 | tcagccccgc tgactgcaag gcccttcacc tgggggcaca aggtcgcagc aagccagagg |
| 59101 | aagaggtagg aactatggag cctgccataa gttcctgggg ttgggggaaa ggggaatttg |
| 59161 | gcagtgagag gggacaggta gaaggggcaa aatccaggac cgaagataga tgggaaaggg |
| 59221 | cctatctccc cctttttcat ggggaccaag gagcatccca gaacacggag aggttggaga |
| 59281 | aagacaagtc aggctttgag caccagggcc atctgagaac tgaacagctc gtttcaacca |
| 59341 | catctcccat ctcctcatcg gcctctgccc ctgagtcctc tctggtccct gccccgccgt |
| 59401 | tctgatgctc tgtctccagt cctcgggctt tctctccaac cagctgagcc ggggaggatg |
| 59461 | agcgtgggga cactggcagg gctcggagct ctgaggagac tagactgagg ggctgggatc |
| 59521 | agactgaaaa gtccaagacc cagaggagct ccagttaaaa cggctctttc cggctcaaga |
| 59581 | ccacgttccc tgcttgctgg ggaccccatc cctctcctcc gtgtgtgaaa ggatggcaaa |
| 59641 | ggcggaagtg gaggggtctc tcactgccct gattccccct cctggctccc aatttgggaa |
| 59701 | gacagatccc gatctgtctc gggaccagta ggtgaggggc cgggtccatc tcccttctct |
| 59761 | gatgtgttct ctcatgtttg gctcttctgt gtttgtgtgt tttcctccat gcgtccctct |
| 59821 | ccctgcacct cattctggtg gcccccctca cagagccggg aggagcgtgt tctccgccat |
| 59881 | gaagctcggc aaaaaccggt ctcacaagga ggagccccaa agaccaggta ggacaggtgc |
| 59941 | cgcgtgagcc ccgcagcccc gcgcctcgcg gcgccctccc gccgctttcc agcccctgcc |
| 60001 | cggctgccaa aaggccctcc tgggataggt cgtcccaggg ccaggcccca cccagtgatg |
| 60061 | cgtggccctc taggaaggag acgccctagg gccgagggag ggaaacgggc agcgccctct |
| 60121 | gtcgggggtg cctggttaca aggctcctcc cgccctcgtt gctcccggtt cttccttctt |
| 60181 | cacgcagaag cccagtgttt taattagagc agagaatatc catcaagaaa cgctgtttgg |
| 60241 | ccaactccct atttctgggg ggaaaccgtt gtcccactag tacggggtcg gcggcaggcc |
| 60301 | tcgcccaagc gctctcacca ggctgcagcc tggcctttgg ggaggtcctg gggccgctgg |
| 60361 | agggcgcggc agggccgggc ctgggaggct ggagcagcag gtggcactgg gccctcccgg |
| 60421 | aggagcgact ggagagggga agacagctgc tgcagaggag gcgggaggcc tggaggaaga |
| 60481 | caaggggaga aatggagagg acaggggagc tgggaggggg ccatcttctc catcacgggc |
| 60541 | ccaccatcgg ggctcccggc tgccctcccc cagcatcccc tctgtggcct actggccctc |
| 60601 | aggctctctc ccccaccctc ttgcccccat gccaattcca gccgtgccct tcaccttctt |
| 60661 | aaatggagag agtacagctg ctggctgagg accaaaccca gcatccttgg gtggctgttc |
| 60721 | ggaatccaca tgtctgcatc tcattagatg aatacacacc aatgcattag gttctgaatt |
| 60781 | ccatcagctg tttgatatgg ataagttact tcctaagcct tcgtttctgt acctgtgaca |
| 60841 | tgagaataac gcccatcttg gcagggcaca gctctaagga ctagagatag tcatgtaaag |
| 60901 | tcctggtgtt gtgcctggaa cagagagtat ccacccaaca aatggtagct atttattgag |
| 60961 | aggtgcaaaa gtatggattc tttattccct accttcttcc ataagagata ttcagtgcct |
| 61021 | aagtaagtgg tatacaataa aagagcattc aattaaaata aaaaggcaag accagacata |
| 61081 | atggccattc aaatccaaga tcgggattag gtagaaaaac actgcagtta ttcaggccat |
| 61141 | aatattctaa gcggtagcaa ctaagtaaac ctcgaattta actctcagct ttctggatgc |
| 61201 | cagagtaaaa ggagaaatgg tcactatctc accatcagtc agcccaccta accagtcttt |
| 61261 | catcttcccc agatgaaccg gcggtgctgg agatggaaga ccttgaccat ctggccattc |
| 61321 | ggctaggaga tggactggat cccgactcgg tgtctctagc ctcagtcaca gctctcacca |
| 61381 | ctaatgtctc caacaagcgg tgagtggacg ggagccctgc aaccccagct gcccccaccc |
| 61441 | tgtcaggcag gacctggctt gccatgattg gaatttgggt agggaagaat cagggctcat |
| 61501 | ggacggcttc ttcctaacct aaccttaccc ttttctgctt ttccttgggt gtttttctca |
| 61561 | cctctctccc tgcaaaagca gagcacagca gctgcaggcc tgttctcagg tccttgaata |
| 61621 | cctcccagcc caaggaagcc acagacctgc ccaccccata tttgaaccta ttgaccccat |
| 61681 | gtctgtctct ctgttacttc tgcctttgat tagttctctg tgttgaggcc tctgaagaca |
| 61741 | actaatcctc actattcttg gcagtgcttg agtgtttaaa gaccatgatt ctgtccctct |
| 61801 | gcccactccc aggtctaacc actgccagtg tcctcctccc caacaagcag tccccatacc |
| 61861 | ccaggcctga tggtacattc tcttcctcag atctaagcca gacattaaga tggagccaag |
| 61921 | tgctgggcgg cccatggatt accaggtagg tgggcacctg gaggcctcat gtctttcaga |
| 61981 | ctctgctcta gtgggggatt ctagccggat gtgcattatc cactatactg aggcatggat |
| 62041 | ccaggggtca tagagaacaa caagctgaat ataagttccc aaagtaagct tgttcctggg |
| 62101 | aggcattcct agaagtatca tcagtagaga gatacaaacc caaagaaaag cttgagaact |
| 62161 | ctgcctatgc taatcaaagc ccttccagta tttcatgttc agtattggac ttcataaagt |
| 62221 | gagaagcacc tagaaaaacc ataaagagac caagaactac aaaaaagtat tcaaacagtt |
| 62281 | aaaataaggg cctttgaaga aagttttcct ggcatgattt ttaaattgtt gttttgtatt |
| 62341 | atttgattgc tggaagtaat gacgattctg tttatctctg gatggtgaga ctgtgagtga |
| 62401 | tttttttctt ctttttgctt ctctgtattt tctgagatta acacaacttt tttatttgtg |
| 62461 | tgcttctaag accagagaca aaagactgag acaaagagag gttgacagct gtaagaatgt |
| 62521 | gaatgtggcc aacagtgcag gcaggacagg tgatgagcat gtctggtggc tgctgggaca |
| 62581 | ccatctctca ggaagggccc agggaccctc cattgctcca gaccctccct tggaggctaa |
| 62641 | caggactcag ctataaatca gaagactgct gggctttcct aggattgagt tagaatgctg |
| 62701 | gctgctcaga ggggacaggg cttgcaagag atctcacctg gctgccactg cacttctgtc |
| 62761 | ctggggatgt tcggtctggg tatcagcacc aggccccaga atcagagtga gccccatcta |
| 62821 | ccagggtaga gctttatctc tgatgcctag ttccagaccc caagcacact aacccttctt |
| 62881 | tacggacaac cccacctccc ctcactcagg tgatgatgga aaggataaga tggcactttt |
| 62941 | ctatgtaaaa ggtacatctg gccatgtttt ctccagaata tacttcatct cccttcatct |
| 63001 | ttgttttagt tagtttccat ctactcaggc aactgtcttc ccaggtgcct gaaaaacagc |
| 63061 | cccaggcaat gtcaaacgga cctgcccctg tggttttaaa taacttcaag ccattggatt |
| 63121 | ccttaggggt ttgagaatgc cggcccctca cctctgccaa aacccaaaca caaagtgtcc |
| 63181 | tgagacttcc gagggctttt ccaagggatt gggctcaggg ctttgtttct ctgtgtgctg |
| 63241 | agaactggag aattccaaag aacaacgacc ccaactcagg tatcatgtca ctggcctaag |
| 63301 | aggtaaggac acatcaaaaa tagagtcatt attgttcatg aaacttattt ttgaaggttt |
| 63361 | attctatgcc aggcactgtg ctaggagcta tatatgtatt tccattgaag ttaatgtaat |
| 63421 | tcttcaacca cccaaatata ggtgttactg catttatagg taagaaagtg aggccccagg |
| 63481 | aaggtcagga acttgtccca ggtcgttgcc actaagttag ccaaggttag agccagggtt |
| 63541 | caaggccagg ggtgtctggc catagccata agagcaattg acttctctat atcaagcctt |
| 63601 | ctagacagct gctcccttcg ggtccctggt tcatcttcat cttgctactt agtgcttgtt |
| 63661 | ttccaaacct tttcaaactg cctcctacca gagactttta ttaactggac cagacattgt |
| 63721 | cccctccaaa gactttttaa accgaactga acaaaacggt tgttgtattt aacctggtag |
| 63781 | catagtgttt cccgacaagt tcattcacaa ttaaccttgc aaacatttga gtgagagcta |
| 63841 | tgaggatgca aatgtgaaat tattttcact tccaatacat acagtgtata atgcaataaa |
| 63901 | agcaggccgg gtgcagtgac tcatgcctgt aatcccagca ctttcagagg ccgagatgag |
| 63961 | tggattgcaa gaccagcctg gccaacatgg tgaaaccccg tctctactaa aaatacaaaa |
| 64021 | attagccagg catggtggtg gcgcatacct gtaatcccag ctacttggga ggctgaggca |
| 64081 | ggagaatcac ttgaacccag aaagtggagg ttgtagtgag tcgagaccgc accactgcac |
| 64141 | tccaacctgg gcaacagagg gagaccttgt ctcaaaagaa aattaaaaat aaataaataa |
| 64201 | ataataaaaa gcaataaaac cagatacgac ttcactctct tggagacttt gggtttgatg |
| 64261 | agatataaag accgcaggaa ggacacctcg ttggtgagat gtggggagac ttagctgaac |
| 64321 | tcagatccag gaagggttgt gagggctcag gaccattcta aaggttatgg cactgaaaga |
| 64381 | agcctggagg taaaaggacc gcggcgtacc catgctcttt gtttcttcca tttagaatgc |
| 64441 | acgtcacgtg taaactcttt cctgattatt gccatctcca aggcaagaaa ccacagtcac |
| 64501 | ccccctgtga atgtgcagtt tccccaccag agtgagcaac gcttggcact tggcagagat |
| 64561 | gttcttggtg gatcaagggg tcttgagtct ctttattacc atctcttcct ggcaccaaga |
| 64621 | cttaatacat tgtcacccaa catctctcca gttttcacct ccatttcatg cccctgccac |
| 64681 | tgacctgagg tccccagcct caactgcatg gttgtaccta ctttctacct ggtctccctg |
| 64741 | ccctcatatt gcctcctcca ctccaaactc catgccacca ctggagcaaa cttctgaaaa |
| 64801 | tgcaaatctg gtcatgtcac atctctgcca cctggaaaag tggggagtgg gtaatggatg |
| 64861 | ttgcagaagg acagtactaa agggcgcacc aactctcatc tctggctccc agcagatgtt |
| 64921 | cctgaagctg gatcaggtcc ctgggaagca ggtcacaaag cattattact ctcgggtttt |
| 64981 | cccaggacag gggtatagat ttaccactca gcattattcc ttgtgatcgc tttcatgaag |
| 65041 | ccactgggga gtatgtccct tatcttgaaa ggagatggtg gaatagtcag ctggtcagtt |
| 65101 | ggtcccagct gtggctccgt ttgcctcttc atcttccacc ctggaaaaat tgagtcctct |
| 65161 | gctgatgatt ggagagaagg atggccaagc ccctccccca gaaccctgga gaatgaccag |
| 65221 | ccatttttta ttttttattt caagtgcatc atttcccctt cctagagccc caggaggggt |
| 65281 | gggaggcagc aggaatggca ttccccttcc cccaacacca tgcgcctggt ggtctttctc |
| 65341 | cagcgccctc agcttcctct cggggctgcc cttcaaccag caatgagcac cctctggagc |
| 65401 | ttctcttccc tccgttgctc cttcaagcct ctgcccacct tcccctccac cctccgcctc |
| 65461 | tactgccaga gcttctgccc aggttgtcac cttcactggc tctgctacat ggaggaaggg |
| 65521 | agaaacgtat gaggcctgaa aagggggaca gggagaagta gcctgtctta tggccatgcc |
| 65581 | tcgagatgga aaacataaaa accaaccact ctcttggcag tgggaagagg acttgctgct |
| 65641 | ggcttatctt cggtagatgc caaaactatg tctgtccgct tcccagtcct gagttataga |
| 65701 | aagccttttt tattgttggt gggggcatta gttgtggaaa aattcatggg gtttttaaaa |
| 65761 | atctttggca aaaaagggtt cgtggaagtt aaaactctac aaactattgt gcaaagaagg |
| 65821 | acttctagtg tccgtttgct ctcttcatag taaacttctc agagctaagt tagttagtcc |
| 65881 | tatttccttt ttagctccct gaaggagcag tgaatattga acttctgtga agctccagat |
| 65941 | tctaagcttt tacttccgtc cctttgtcac ttcacgttcc aaacggaaat gtttgcttcc |
| 66001 | tagttcaagt gtcacttcat ttgtaaatat cccctttcct ggcaatgttc tcattaacat |
| 66061 | tggaatttct atttccttaa catgattact tctgatgtgt agatttttaa tcaccctcag |
| 66121 | gttatttttc agactttgat ggacactgga tgatcatttt agtggttatt ctttttcatg |
| 66181 | gaaagggaag ataattctct caagtaaagt cgtatttaga agttgcatca aagcacaact |
| 66241 | aaaatatgaa atctccaaga tgacaggcat gaaaagcaac cttcggagtc gcattagaag |
| 66301 | aatgtgccgg gctcagtggc tcacgcctgt aattccagca ctttgggaag ccaaggcagg |
| 66361 | tggatcacga gggagactga gaccatcccg gccaacatgg tgaaacctcg tctctactaa |
| 66421 | aaatacaaaa attagccgtg cggtggcagg cgcctataat cccagctact cgggaggctg |
| 66481 | agtctggaga atagcttgaa cccgggaggt ggaggttgca gtgagcctag atcgtgccac |
| 66541 | tgcactccag ccggggcaac agagtgagac tctgtctcaa aaaaaaaaaa aaaaaaaaaa |
| 66601 | aaaaaaaaag aagaatgtac agaggtccat gcttattcta gctggggaaa ggcttttctt |
| 66661 | gttaaaacac acgtttgaga gaggcaagtg aatcaatcat tctaagtatc atgcacaagc |
| 66721 | tccctacttg agagatcaac cgcttagctg aagggagatt ctgttggggt cactcacatt |
| 66781 | ttgtagagct ttctgctgtt taggatgcat tttgacacac atgatctcat ttaacctgca |
| 66841 | tacaacctta caggtagctg gtgtctctgc ttgtaactga aaaacacaag gctatgtggt |
| 66901 | catttgccct cacacctggc aacatgtcag gtctggggtt caatcccaag ttcagcaacc |
| 66961 | cccagtacat gcctctgtct atcttaacat ggccaccctg acaggaactg acacctccaa |
| 67021 | atccaaatga gacctgatgg cttaaaatga gggttcggga aaagtagtag tgatgtcaaa |
| 67081 | aattactggt gctctggctc tctctctctc tgtctctctc tctgtcctta tatcttttta |
| 67141 | gcttaaaaag ccaataattg gctggtcaca gtggctcgtg cctgcattcc cagcactttg |
| 67201 | ggaggccaag gcaggcagat cacctgaggt caggagttca agaccagcct ggccaacatg |
| 67261 | gtaaaaccca atctctacta aaaaaaaaat acaaaaatta gccgggcggg gtggcatatg |
| 67321 | cttgtaatcc cagctacttg ggaggctggg gcagaagaat cgcttgaacc caggaggtgg |
| 67381 | aggctgcagt gagctgagat catgccactg cactccaggc ctgagtgaca gagagagact |
| 67441 | cagtgtgaaa aaaaaaaaaa agccattaat catttgtggt aagctccaca aggaagaatt |
| 67501 | tgttgcaatc ccacctgtgc ctggctccag caggtttcca ggaaacattt gttgcatgaa |
| 67561 | tgaacaactg aaatagggct tcccaggata taagtaagat tgcagagctg gacgccacat |
| 67621 | aaaggacaca gcagagtgca cacaacatac aatcagtagg ctgaaaaagg cggctcaggc |
| 67681 | aggcaccaaa gccgcactgg ccatacaaac aaagaaattc agcaaacaat gtggaaaggg |
| 67741 | gggggagcca aattccagaa atgcaaagac gtatcagagg cctgcaggct tacatgagaa |
| 67801 | ttcctggagc aggaaattaa atgcaagtta atgaagactt tgaaagcttt attcctgagt |
| 67861 | gcatgaaacc tgtgacatgg gtttggcagc tctttctgaa gcagagccat cgacgctggg |
| 67921 | gaagaacgca gggcacttgg catcacctag gagctttaaa aatacagatt ccagcctggg |
| 67981 | cacggtggct catgcctgta attccagcac tttgggaggc cgaggcagac agatcacttg |
| 68041 | aggccgggag tttgagaaca gcctggccaa catggcaaaa ccccatctgt ataaaaaaga |
| 68101 | caaaaattag cccggtgtgg tagtgcatgc ctgtaatccc agctactcag gaggctgagg |
| 68161 | cagaagaatc acttgaaccc aggaggcaga gggttgcagt gagccgagat catgccactg |
| 68221 | cactccagcc tgggcaacag agtaagactc catcaaaaaa ataaaaatac agatgcctga |
| 68281 | gctgcatgtc caggattgga ttggattggt ctggaggtgg cctgggcatc agtgttttta |
| 68341 | atgcctctcc ctcccttcgg cccagcaagt taagtctagt gaacactgac ttagaggtta |
| 68401 | gccaactcat actcctctat aaatgaagac acttgaggca tagaaggaga aagagccagg |
| 68461 | atcacccagc agatgagagg cagtggtcag aatggagccc aggaggccag tgctggctcc |
| 68521 | cgggccctcc ctctgaccct gctgccccag cccctggacc cctgcgggac caggctccta |
| 68581 | ggctcaggca gctttccttc tggctccccc ttctcctgcc tgcaggtcag catcacggtg |
| 68641 | atcgaggccc ggcagctggt gggcttgaac atggaccctg tggtgtgcgt ggaggtgggt |
| 68701 | gacgacaaga agtacacatc catgaaggag tccactaact gcccctatta caacgaggtc |
| 68761 | agtggccctg tggggaaagg agcctctgta aatatggcag gagggtggcc ccagccctcc |
| 68821 | ccaggagaaa taggagtggc tggaagtcaa ggagcacaca gggctaccag caggggtgat |
| 68881 | ccaccctgtt acaaccccca ggacactgac aaacagagcc acatcttctg aatcctctga |
| 68941 | accccccagt ctagagcaca ggccgacact ggtctttgaa gcgtacacca cccgggtgct |
| 69001 | cctgggcaga ccccagcagt gcctgtgaaa gaaccccccc ccaccccact ccccaagagg |
| 69061 | cctggttccc actgtttccc aggccagagc ccaaggacag ggctgcctca ttccaaccca |
| 69121 | tggtggcact ggcaccatta gtaagcactt tctaccagcc aggcatgctc ctaaatgctt |
| 69181 | ctgaactgga ccatccaaag ttgtcactat caattccctt ttacacaagg ggacagtgag |
| 69241 | acttctgaag gcagaccttg tccaacctca cagtgccagc atcgcccttg gcgtgctagt |
| 69301 | ggggttctgc cctcttggct cggctccttc atggttgcct aaacttctgc gggcttctct |
| 69361 | ccagagcact ggccttgatt ttagggtgtg aaagagaaaa catttggtac ccactcctat |
| 69421 | tctttccagc catttgaggc cacatcaagg gtgagggacc tcagagacct tctactttaa |
| 69481 | tctccccatc ttacagagga ggatactgag gcctccatat ggaagggcct tgcccacaat |
| 69541 | ctcagagagt gttgctgata gagcaggggc caggctgccc acccagcttc cagcccaggg |
| 69601 | ctctggccac catcacaaat atggcacctt ggttcccagg ctccagatgg gaccccatca |
| 69661 | taatcagctc tggggaggga tgtgagaaat agagaaatac actcactcat caaaacccaa |
| 69721 | agaatgactt agaggcatga agaacagcga aagtgagact tttaataacg gtcttgcaag |
| 69781 | atggagtgtc tggtaggcag gcacccctgg ggcagtcaca acaggaattt atctcctagt |
| 69841 | gtgcaagtcc ctcccccact tccccattgg ttgagcacta tggggttaca atcttccctg |
| 69901 | acgtcgccta agtttcattt tcccccttac aaggttatac cccgctcccc ttcgatttcc |
| 69961 | ccacttaagt ttcgatttcc caataacaaa actttcttcc ctttcatggg ctgacccctc |
| 70021 | ctctacattc tgttcgctta ttgtgtcctt ctaggtgcat gagccgtgtg gtttgttgca |
| 70081 | ttcgcaggtt ggatgccagt acttagactt atcctgcctt gaaaatggac cattgaaaat |
| 70141 | gttttctcac caggatgccc aggcctttcc cagatgcctg atcacacatc agactaaccc |
| 70201 | agaagccaca ggcctgggcc ctgccatccc tttcctggag ggttccccag tctgtttctc |
| 70261 | ctggtggctc caggcagtga ggggtgccag gctgtcccaa gtaaggcagc tgagtcccgt |
| 70321 | accctgaggt gggtgagggc tgaggtgccc cctgtagctt gggggagggc atttctcagg |
| 70381 | cagctctgag agtcctcaga ctgtgcacct gcaggaagaa aacccaggcc cacctctgcc |
| 70441 | cttcagccca ggcctggccg aactctcctt tgtgaccaca aattgactct gctctcccag |
| 70501 | ctgctttccc acaggccccc cgagctggac aacctgctca ggacccctcc agccccaagg |
| 70561 | acattcagga ttgacatctc tggccttacg ttaggacaca tcctgactgg acaagtctcc |
| 70621 | gcctagataa gcatctatgt ccccaagaca ggcatggaga caggtccctg tggccccggt |
| 70681 | ggttacttga tagcagtgaa gccacttctg ctaacttaag ggatctccct ccaccaggcc |
| 70741 | cacacacctt ggctttcatt caaattactt cctctttccc aagggcacag agctgctctc |
| 70801 | cctactctgt ggctccccca gaaaactcct actcacccgg cagggcccag ctcaaatgtt |
| 70861 | cttgctactg agcagccttg cctgctctgt ctgggtcaga ggtcagcact cccctttctc |
| 70921 | tgcagtgtta atgtcctgga gttgaggttg gtcctccgtg tctctgtcct gctggtggac |
| 70981 | tggaggctcc cagtctcctg cctcgctatt tgttcagagc caggcatgta ctcggagggg |
| 71041 | ttcagtaaca ctcacccaaa ggaagacaca aacatccact gagcatctgc cgcacaccag |
| 71101 | acagtggcac gtggggcaac atggaggctg ccgagatgaa ggaggcacag tttccgccct |
| 71161 | gcgcaggtcc cctccttgtt tcagcctaga atctttctaa attccctatt tacttcctct |
| 71221 | aagactgact attcattctg ctcatctttg gacaatctta aatgtgtttc tgatcacatt |
| 71281 | tttgttcttt ttcacaaacc caaatagctc tgattttgtt tctgtttcct ctaaactagg |
| 71341 | gtttctcaaa ctcagcacta tggtatcttg gactggataa ttgtggtggg atcgtcctgt |
| 71401 | gctgtgtagg atgtgagcag catccctggc ctctacccag tagatgccaa tagcaactcc |
| 71461 | ccttagttac agctaccaag tttccagaca tgccaaatgt cccctgaaat cgccctcagt |
| 71521 | tgagaccacc attctaaact atcttactat gattccttcc agccccaaat cagcctttcc |
| 71581 | agccccaaag ctttgtttcc cttttcttct ctttctatgc cacattcctt ttcaatgaag |
| 71641 | gacatcctcc tcgtcgtggg aatgtattat ttctgactaa ttatctgagc tggtaggaac |
| 71701 | cttcctttgg ctccattaaa acaacagagg gaggtgggaa caatcaacat gacttaggta |
| 71761 | tctaagctat tacaaaagga aaatatgctc aggaaataac aggaatttga ttgcagacag |
| 71821 | ctcagagagt tcgggattct ggctctagct cagctagctc gctcccctgg ggctggcaca |
| 71881 | tctgcgggca cctggcctga tcaccctgcc tggccctgag cctgcctgtg tgcagggaag |
| 71941 | ctcaaaacct ttgcccttcc ggaacaagct ggccattcac aaaccagact aaggctcctt |
| 72001 | tcctgtgtgt cctgtgtgtg catctggccc cgccctgggc atcttgggag cgccaccatc |
| 72061 | cttcctcctg ctgaaaatcc acctctcccc tttgccttgg atccttctct ttctacagct |
| 72121 | caaagaacct ggcattgcac agcccaactc tgtctttgtt tttcttccag ccccttcttc |
| 72181 | cttgcctata aggtgttcta ctccagcata tgctaagtac aaccatgaag acccatgtgt |
| 72241 | gctcaaggac aggaactagg agtctgtcac ctctctctgg gcctttcctc attcccacac |
| 72301 | acttctccag tgacctcctt tttccctcca cccctccaca gtcagaccac ttgggttgtc |
| 72361 | ctcacttcct ccccccagtc acccctcaat ctctgcaggg tttctgcctc cagatgtcat |
| 72421 | tgacactgct ctcctcaagg tcaccaagga cattgctgtt cctgagtata atgtccatgt |
| 72481 | catcctcctc tcccttgatc acccagtttc tttcatcccg ctgcctgctg ctcctcttgg |
| 72541 | gggcccctca cgccactctc ctgcttcccc tgtctctcca gctccatctc cccggcctaa |
| 72601 | cttcttggct gaaaggctgt gtcttcttgg agccctgacc tgggcctgct tcccctccca |
| 72661 | tgctctcccc aggtatctcc tccatctcca aggtgtcagt taccatcttg tgctgacgat |
| 72721 | tcccaaatcc atatccccac ccgcctcccc agagcttcag aactctggcc agcacaccct |
| 72781 | gggcctgtta gtgtcatgca cagctgtcgc tgcttgctat gtgcttaccg tggtgcacac |
| 72841 | ctgtgttaaa gacttgacca gggtgtctca ttgcaacttc acaaccacac cttgaagccc |
| 72901 | cccaagtgaa tggcacccct ggagcagttc agcacgacag ccctggatca tatctccaca |
| 72961 | ttcataggat aataggtaaa ctgaggctca ggcaagaaag tgagtgatct agcagtaaca |
| 73021 | gccaggtggg gctggctctg aagctggctt taccctcagt gctcaagggc cagcccccag |
| 73081 | cagccaggag cacgttctct tcggacattt accccaagca cattggaaat atttctccct |
| 73141 | tctcccccac cacagttcac caaagcagca gcccctctac tcactgcccc acaccctcat |
| 73201 | cctcagcacc tgcacaccca ggccagggga agagatgggg actgcaaatg tgcatggcag |
| 73261 | cccacagcac caaaggacag tgcacaccca tggcatttca catcgactgc caactaagtg |
| 73321 | cttggcacac catggttcat ctgctctgag gcttgcgtta ttttacagtt tcacctctct |
| 73381 | gaatttggga tgtgtctcct aggcagcctt gtggcttcat ggcaatgtcc atgtggctta |
| 73441 | ttaaaccgta gtatatctta cagccagtag ccactttaga tttggtaaaa tatgttacac |
| 73501 | tgtctcatca gagcctcata acaagactct gaggtgggtg tcattatccc catttcacag |
| 73561 | ctcaaaaaac tgaggttcag agaatgtgtt gctcaaggcc acacagttaa gaaggtgcag |
| 73621 | agcggggact agaacccagg tctgcttgct ccctggccct gtgcctcttc tgagcacagt |
| 73681 | acaagggcat gggctgtccc acctactgtt ccaagttcct ttcccacccc acactagcca |
| 73741 | gcaccagccc cacctagggg atggggctct gcttcctacc acccaccacc agggtcaatc |
| 73801 | aggatcagat gagttgcctc tgctgctcct ctgaactttg gggctcaggg caaatgtctg |
| 73861 | gggtgcagac aggccctgcg aggagggagg ggcccaacac tgcctgggct gttgctgctg |
| 73921 | ccctcagtga cagcaggcct ggatccttcc ccctccagta cttcgtcttc gacttccatg |
| 73981 | tctctccgga tgtcatgttt gacaagatca tcaagatttc ggtgagtggg gagcagcccc |
| 74041 | tggccggcag ggccactccc tcaaactgca cctttgtgca gacttgagag gggccccctc |
| 74101 | tgtctagacc catgataaag aggcagcgcc gtgcctggac acacggctgg gcaagtaggg |
| 74161 | acaggctgga ttctggcccc cacccacccc tttcattgga tgcctctgaa tagtgcattc |
| 74221 | gcccgtaaac agtggccagc aagaaactgg cgtgggcagg aggagctgat gctgagcctc |
| 74281 | agtgagccac cccactctgc caacgccctc ccacttcacc acaaagctcg ggtcccacca |
| 74341 | ctgccccatg gaaagcctca cccttgctgg gcctgacggg tgggctgtgg ttctgcctga |
| 74401 | aaggtgattc actccaagaa cctgctgcgc agtggcaccc tggtgggctc cttcaaaatg |
| 74461 | gacgtgggaa ccgtgtactc gcagccaggt gagtacctgc gcatggccag tcagtcgagg |
| 74521 | tgtgcatggc tcagggagcg tggtgcacgg ggcccttccc actgtggcag ttcctgggaa |
| 74581 | aaggctggca aggaccacag tctggcgact gttagtacac acagccatct ggcctgcgga |
| 74641 | gaagtggcgc gcacagtctg tacacaaatg cagtgagcaa ctgcgcaccc agtctggtgg |
| 74701 | gttctcactc ataattaggt gagtaactct gcacagagcc tggaaggagc ttcatcacac |
| 74761 | gctctggagt gcatggcagg ctggtgcatc actggccata ggcaggctga ccagtagtgg |
| 74821 | tagaggatgc ggtgagggag acccgtcaca gcctgcagag aggctgcgcc cagactcctg |
| 74881 | cctcctgggc tggcacctgc tgagcagaaa agaacccctt tccacccctc acaggaccct |
| 74941 | gccgtcccct tttacagttg aggctcagag ccagggcttg ccccagccac acagctggcc |
| 75001 | gggggtgaag tcaggctgtg tgtccccaga gcctcactga gccacactat ccaatctgaa |
| 75061 | aggggtgatg ctggtcaatg ccagatgtag tgcggcggcc tctgagggac tctggtctct |
| 75121 | gaaaacactt cttacaagag ccccaggctt ttgggcagcc atgtgtgctc cgtggcgtcc |
| 75181 | tgtagggtaa cagcaatggt gttggcaagg gaaccccaag gggtggccca gagggcttgt |
| 75241 | gaggtgggcc aggcagagga agtgcctcag cctgccagat gacagctcac cacgtgggca |
| 75301 | ggttagggac caccctgtgt ccctgaagtg aatgcactgc tcagagtgct gtaatgaccc |
| 75361 | cattaggcgc tttgacagtg agaacataat ttcacccaat tgtcacattg ggccctcaca |
| 75421 | aaacagtaat gtaggcagca gcatttcttc ccattttgca catgagataa atgaggctaa |
| 75481 | gagaaatgaa ggggcttaga gataccacta aactagtagg ttgaacaaat tggcgatcgc |
| 75541 | ttgtggttca acctaagaga cgtccagctg gtgcacatta caactatgac ttagaccagg |
| 75601 | gaatctgagt ccaaaaccaa gattatacac ataaaaatca caagatcata gaacactcaa |
| 75661 | gctgcccaag acctgaaaaa catctagtcc agcctctgtg aagataaact gaagcccaag |
| 75721 | gtgatgaagg ggtttgtcca ccatctagga gtagcacccc tgtctccagc tcccaggcca |
| 75781 | gtgcctttgc caccacccca cacatgccat agccctcagc ggagggcagc cctgctgacc |
| 75841 | atcagtgcca tggggagcag ggaagagtcg gcctcctgcc atgttgcttt ccaggaagca |
| 75901 | tgcatagccg tggactactt gcttggaatg actggcatcc ctgaggataa gctcctccca |
| 75961 | gggctgagca gtggccctgg taccactggc aggcctgagg ccgagagcca agagaaagtc |
| 76021 | agggggtgga gaaaaaggca gatattagtc taatatggac ctctgggctt ctgggtagta |
| 76081 | aagtcctggt gaggaaacca ccagggcatc agtaagtgcc agatgttggg ctaagctcac |
| 76141 | tgtcccagca ggcctcaccc tcacgacccc atataggcat cattcccatt tcaccataag |
| 76201 | gaaactgagg ctcagcaggc ttaaacagct ggtccagggc cacattgtga gtaagcggca |
| 76261 | gaaacaggat gtgggccgag gtctccactt gggtaaccta gctcgagatt tgctgcttct |
| 76321 | gctgaatcca gccctgagcc tggtgccctc ccagggacag gagagcctga agtcacatgg |
| 76381 | gtcctggagt tgagacccaa tgtctttact ctgatatctc cagtttggcc tgaacttctt |
| 76441 | gatgagtcgt tggttccagc cagggcattg ttggacagca tgctcccaga gacactcctg |
| 76501 | ggtgctgctg ggaagctttg ggtggtgtcg atatctcttg gaactggaag gggtttcccg |
| 76561 | agagaacctc ttctcaccct ggcaggacca cattttgtca tttgtaccac cagatgcaac |
| 76621 | atcaggaaac tgtttactgt ttgctactct ctgttggggg tgaggacggg ccatacactc |
| 76681 | atcctcatag atcatagagg aagtcagggg catacactca tcctcataga tcataaagga |
| 76741 | ggtctgggat gcagcaactt ccccagctgg gctacccttg actggcaggt gtcagcccca |
| 76801 | ggctgaaggg aggtgaaatg atgtttcagg ctggtaagca tatagctcag gatctcatgt |
| 76861 | ggtccttgta tctctagcct gagatcacac agtattagga ctagaagggc ctcagaagtc |
| 76921 | atgagtcaag tgttaacctg atgtagggac ccccacagca ccatctctga ttggtcctct |
| 76981 | aaccttgctt agtcctccca gaaatggggc actcactact tcttatttta gatatcttca |
| 77041 | ctttctttag gtcatctcaa aatctgtcac cctgtaacct tcacccactt tcacacgtct |
| 77101 | ctctttcagg acaaaaagaa aaatagcctt taaatttgaa ggtaaatttt acattcctcc |
| 77161 | tgaaccgtat tctctttctt tgctaaatgt ccccaattca tctaaccatg cacacctcta |
| 77221 | tacatctacc cctgtatcca tccatccact cacccaccca tctacaaatc catccaccca |
| 77281 | cctgtccaca gatccaccca cccatccatg tatccatcca ttcacgcacc aatccatata |
| 77341 | tccattggtc cacccaccca cccatccgtg aatccatcca cccacccacc cgcctgtcta |
| 77401 | cagatccacc cactcaccca tatatccatc catccaccca cccacccatc catatatcta |
| 77461 | cccacccatc tatccacaga tccatccacc tacccaccca tccacagatc cacccaccca |
| 77521 | tatatccacc catccaccca cccatccata tatctaccca cccacctgtc cacagattaa |
| 77581 | tggctccttc tatccagtaa tccattcacc atctgtccgt ctatctctca gccggccagg |
| 77641 | cagctcacca cccatccctc tgcccattta tgcacccatt cattgagctt tctgtccatc |
| 77701 | tcctcatccg acacacatct gctctggcaa gacctgaagc tcctgggatt cctgggacat |
| 77761 | ggcccctccc tggaggcctg ccagcctggc tgaggttctc cagtgactcc tcatccacgt |
| 77821 | gccttcctgc cctctcacct tgcttgtccc tctcttcaga ctctactgtg gcattatctt |
| 77881 | ttctgagaca caggtggcct ggctattccc agaaaggcca acctctgtac acagccccta |
| 77941 | acatctccgg gagcccacca gggccacagg cttgcaggac acaggcctgg gctacggtag |
| 78001 | aaggtggaag aggagggagt gaaggaggga ggtgctgagt ccctgagagt tcagtgccca |
| 78061 | cctaacatcc cgggaagcag attcctaagg cacagtgatg cgcttccctt tgcttgccca |
| 78121 | ctgggcttaa agtaaacctg aaggggcaaa tccttcctaa agcgcctcct tccctgacat |
| 78181 | ccgtcctttc ctccacacag tcataggtca tgggacactg ggatgagact gacaatccct |
| 78241 | gtctttagga gactctcagt ctaaaatcag agccaaacaa tacccagatc agcacagtga |
| 78301 | gatgggaggt gtgcatggag agcacagaga acaaacacta aagagcccag gatcaactct |
| 78361 | tccgaggaag tcagggaggg ctgcatggag gaggagagac ttgagcaaaa tgagtagaag |
| 78421 | tttacaaatt gaatagggag aaagacaggt ggaggtggag agaacaggaa tgagggcatt |
| 78481 | ccaagctcaa agagcagcag atgcaaaggc atggaggtat aaaagggcat ataaaaccgc |
| 78541 | aacacctgtt cagcaaggag gaacacaggg ctgggtgggc tcagcagagt gagtcaggga |
| 78601 | gcactaaatc aggagcctgc aggccatgcc ttttgtcttc accccaaggc actgggaagc |
| 78661 | cccagagggg ctgaagatgg ggagcaggag catgagcctc cacctgggaa ggccctgtgt |
| 78721 | gcagctgtgt ccttcacagc tatgtgaagg ctggctgact ggggtggggc catagaagag |
| 78781 | gccacaggca gaaaaaccca attaggagga ggctgtcgtg cttccaagtc acaccactca |
| 78841 | tgggatatat gtccatgggc aggccatgca cccactgccc cagctccaga ggacctcaga |
| 78901 | ctctatcaca ccctgggcta gggacaggca gagctgtggc cccaggtccc gggactctag |
| 78961 | ggaccaagac agcatttggt tctgccaccc cttggcctgc cctgagcact gggagacgct |
| 79021 | ctgggtgggg gtgtctggtg cagtgcccac ccctcatcat tgcagagcac cagttccatc |
| 79081 | acaagtgggc catcctgtct gaccccgatg acatctcctc ggggctgaag ggctacgtga |
| 79141 | agtgtgacgt tgccgtggtg ggcaaagggg acaacatcaa gacgccccac aaggccaatg |
| 79201 | agaccgacga agatgacatt gaggggtgag gcccagctac cccagcccct ggagtctgag |
| 79261 | ccagcccttc cttcccccag ggagcccccg gtgagggttt gctgagagca cctgccaccc |
| 79321 | gtctccctca ccctgctctc gctcactctc ccaagcagcc ccactcttcc gaggcagggc |
| 79381 | aggggcaggg ggtgatggag gatggctgag aatatcagtc ctttgacatc ctttctgcca |
| 79441 | gtgagaaatg ggttgagaag agtcgatgct ggcagaccag aaccagcagc tgctgggtcc |
| 79501 | tgagtatagc agcaggaagt gctgggagag ccaaggtttc ttctggtgtg ccaattccag |
| 79561 | gcagctgata gcagctgttg agaaatattc tgtgaccttg tctggagtca gtgggtaaaa |
| 79621 | gtgctgggaa tcaatgaatc ctgtcttttg tgagctgggg gagagagagt ggctactgtg |
| 79681 | aagtttttgt ctacgaaaca aaagatacgg cacaaaacta taaaacactg acaataatac |
| 79741 | taagatcata tcccaatgta caatctacaa agcactcata tgttttagcg tgcttgagcc |
| 79801 | gatcatgttc ttgggaggtg ggtattatta cagccacctc aacagtgagg aaacggcagc |
| 79861 | tcagtgagat gggaagattt gcccagaatc ccacaagggg caagttccgt gaacacaagt |
| 79921 | gtctaatcct agccttgctc cctcagctgt cccttagaga ctgtgccagg acccaggagt |
| 79981 | gtgtagatgc caggatgggg gttggggacc tggacctggt gaccatggcc ctggctgtat |
| 80041 | gtgctggcag gaacttgctg ctccccgagg gggtgccccc cgaacgccag tgggcccggt |
| 80101 | tctatgtgaa aatttaccga gcagaggggc tgccccgtat gaacacaagc ctcatggcca |
| 80161 | atgtaaagaa ggctttcatc ggtgaaaaca aggacctcgt ggacccctac gtgcaagtct |
| 80221 | tctttgctgg ccagaaggta ctggggtatg aggtacagga ggctggggct gggtgacagg |
| 80281 | tatcacaagg gcaggctgat gggtgtgggg cctggggcag ctgggcaggt aagacaaggc |
| 80341 | tggaaatcat gttggccagg gacggactta gaggatcctc actgcctcct ggagtcctta |
| 80401 | gactgagagc tgcgcagggg gcatgagagg gaggagaggc tgggggtgtg ggaagagtgg |
| 80461 | agacaagtcc acacacaggc acgcacacac acatgcaccc actcatacac gcacgcatac |
| 80521 | caactcacac acgcacgcat accaactcac acatgcagac acgcacccac tcacccgtgc |
| 80581 | acacgtgcac ccacgaatac acacacacat gcacccattc acacacgcac acacacccac |
| 80641 | tcacacatgc acacatgcac ccactcacac acgcacacac acccattcac acatgcacac |
| 80701 | atgcacccac tcacacacgc acgcataccc actcacacgt gcacacatgc acccacgaat |
| 80761 | acatacatgc acccactcac acgcacacat gcacccatta acacacgcac acatgcaacc |
| 80821 | actcacacac gcacacatgc atccactcac gcacacatgc acccactcac gcacacatgc |
| 80881 | acccactcat acacacacat gcatccactc acacacgcac gcgcacccac tcacacatgc |
| 80941 | acccactcac acacgcacac atgcatccac tcacacacgc atgcacaccc actcacacat |
| 81001 | gcacacatgt gcccactcac gcacacatgc gcccactcac acacacacac atgcacccac |
| 81061 | tcacacacac atgccacgcc ctcacctgtg ctcccccttc caccagggca agacttcagt |
| 81121 | gcagaagagc agctatgagc ccctgtggaa tgagcaggtc gtctttacag acctcttccc |
| 81181 | cccactctgc aaacgcatga aggtgcagat ccgagactcg gacaaggtca acgacgtggc |
| 81241 | catcggcacc cacttcattg acctgcgcaa gatttctaat gacggagaca aaggtcagca |
| 81301 | gcgggagacc cggtgtgctg gggggcagag ggagtggcct gaagggaagg aatatgtgag |
| 81361 | atgccctctc ttcacaccac cgtcatcagc tctggtcctc agcctcacag gtgcttccag |
| 81421 | ggccttgcca gcagcccctg cctcaggggg agggtgagga tttgtggctc aggtcggctc |
| 81481 | agagctggcc tgagcccagc tgactggatt tgtcagctag tagttgtgtg acctgttttc |
| 81541 | ccatttgtaa agtgaaaata ataatgatta tatgatatga taattatagt atgatatgca |
| 81601 | cattatagca gtgtatatac tgcatttgta tataattaca gtgtgtgtgt atatatatat |
| 81661 | gatacctaat agtagtgcct atctgcagaa tcgcagggat tgactacctc ctaggatccc |
| 81721 | tgccctgtgc tgggttccaa ggacatagag tgagataaga atctattcct ggatcaaagt |
| 81781 | gctcactgtg tattgaggag atagatgtgc taccaaatgg tcaaaacata aggcagaaga |
| 81841 | cacaaaaggc cacatgttgt ctgatccatg tatgtgaaac atccggcaaa tccacagaga |
| 81901 | cagaaagtag attgccggtt tccaggtgct aaagggaggg gattgggact aactgctaaa |
| 81961 | taggtgcaga gtttcttttg agggggtgga actgctctgg aagtagatga tggtttatag |
| 82021 | cacagtgaat atacgaaaaa ccactgaaat gtacacttta aaagggtgaa ttttatgtca |
| 82081 | tgtgaagtat atctaaattt ttaaaatgct ataagtgtgt tttttaaaaa aaggcagaat |
| 82141 | aaaaaggaaa tgaaccaaaa aaactggatc atgagacccc tgtcagaggc ctgacaaatc |
| 82201 | ttagccataa gagaagggac ttgtgcctag gaattgggaa ggcttcgtga ggaagcagca |
| 82261 | tttcacaggc agagatggag agggatggcc ttcagcaagg aggggagggg tctgcactgg |
| 82321 | cagggtcacc gtggtgggac agagctgcaa aaatggcaca gggcccaagg tcatgctgcg |
| 82381 | gacttggaag gactggctct gtcctacaag tagactgttg acaattcctg ctctaagttc |
| 82441 | caggaagcag ggagctagac tttgccttcc cactgcttcc agctcaggcc cccgcaggga |
| 82501 | agaaatagac ccaagagagt gctccacccc agcgcagtgt aagaaggctg ccccacacct |
| 82561 | gaatggcaca catgaagttc tcagctcagc acccaggagc tggaggccag ggacccccaa |
| 82621 | aagaggcccc tcttccccag ggaaactgga tgtgacgctg ccccctcatt tttgttccca |
| 82681 | ctgccacagg cttcctgccc acactgggcc cagcctgggt gaacatgtac ggctccacac |
| 82741 | gtaactacac gctgctggat gagcatcagg acctgaacga gggcctgggg gagggtgtgt |
| 82801 | ccttccgggc ccggctcctg ctgggcctgg ctgtggagat cgtagacacc tccaaccctg |
| 82861 | agctcaccag ctccacagag gtgcaggtgg agcaggccac gcccatctcg gaggtgagac |
| 82921 | cccaggcact gtgctgtccc ccagggcctc cagctcagcc cccttctccc tgagtcacct |
| 82981 | gggtcccagg ctttgcctgt tgctgccctg tctacctgag gagtcatacc tcaggataag |
| 83041 | gcttctcccc aggaagcaga ggcccccact cagccccgca acaggactct gccctcgtcc |
| 83101 | actgcctgcc tgtgctctgt ctcacaacgg ccgccaggtc tcacgatggt gcctcccctc |
| 83161 | tgcccctctt cccagccacg gctgtccctg tggtgtctgc agccagccct gcttccatgg |
| 83221 | atatccaggc tggggggccg ttggggtgtg ggctgcctgg ccccaaagcc gggtgggatg |
| 83281 | cccccaccat ccacccccac ggcctgtctg tgagacggaa ggaggcctgg cccccgacct |
| 83341 | gccaccctta ctcaagctca ggaacgcttt gaactgcctc cccacagagc tgtgcaggta |
| 83401 | aaatggaaga attctttctc tttggagcct tcctggaggc ctcaatgatc gaccggagaa |
| 83461 | acggagacaa gcccatcacc tttgaggtca ccataggtga gtgctgggcc cacgggggct |
| 83521 | tcgggcctag gtgagtgctg ggcccacggg ggcttcaggc ctaggctgca ggtggtaagt |
| 83581 | gtgaggctct gcacctcagc cctgtcctca ctcttgtagg gaacgttgac ccctttcccc |
| 83641 | tgagaggcct caagcaccca caaaacacct ttgtgtgtgc atggggtgga ccacgcccca |
| 83701 | taaaggggcc aaccctcagc tccacctaca gggtgaggct gtgtttggga cctggggcag |
| 83761 | agggcaggga gaagcccttc ccggggctgg agaggagaga gtgggaactc aggccacagc |
| 83821 | ctgggccagg gctgggcctc gcactcaggc gtcatgagga ctccctgact ctcagcggag |
| 83881 | tggggacacg ggctaatgct ctctggctaa tgatgtgtca cgtctgagcc ccattccctg |
| 83941 | actctccctc tcccctttcc caaacccaag gcagcaccgg attggacggt gggaggggcc |
| 84001 | tggtggggaa tgcactctag gccttctggg cccattctgc tccaggcaac tatgggaacg |
| 84061 | aagttgatgg cctgtcccgg ccccagcggc ctcggccccg gaaggagccg ggggatgagg |
| 84121 | aagaagtaga cctgattcag aacgcaagtg atgacgaggc cggtgatgcc ggggacctgg |
| 84181 | cctcagtctc ctccactcca ccaatgcggc cccaggtcac cgacaggtgg gcccagcctc |
| 84241 | ccatcctcct gtggcctggc cctcccacct ccctgggccc ccaagacctc acctcccgcc |
| 84301 | tctgcccacc ccaggaacta cttccatctg ccctacctgg agcgaaagcc ctgcatctac |
| 84361 | atcaagagct ggtggccgga ccagcgccgc cgcctctaca atgccaacat catggaccac |
| 84421 | attgccgaca agctggtcag ggccaggcca ggggccagca ggggtggggt cctgggggag |
| 84481 | acggcgctgt cagagggcct tccctggaac acacaaagct ggtctgccca gggggctgca |
| 84541 | ggaacggccc cagcaggacc tctgttccca ttctcagccc caggtcccag ggcacagaca |
| 84601 | aggacaggag ccacctctag tcactcagcc tccagtgaat cctggggcag gagtgttggg |
| 84661 | ttccctgatt tttccagaaa tcttaaaagc aaggctaggg agacaggtgt ggtggctcac |
| 84721 | gcctgtaatc ccaacacttt gggaggccaa ggcaggtgga tcacctgagg tcaggagttc |
| 84781 | gagaccatcc tggccaacat agtgaaatgc cgtctctact aaaaatgcaa aaattagcgg |
| 84841 | ggcttggtgg cgggcacctg taatcccagc tattcgggag gctgaagcag gagaatcgct |
| 84901 | tgaacccgtg aggcggagtt tgcagtgagc caagatggcg ccactgcact ccagcctggg |
| 84961 | caaccgagca aaacttcatc tcaaaaaata aaataaaata aaataaaaca aaataaaaaa |
| 85021 | gcaaggctag ggaagggaaa tggggaaaag ggagaagcga gcagtgtctg aagctcagga |
| 85081 | gctgccccct cctcctctgc ccacccctct ccccccatga gccatgggca ctgactgggc |
| 85141 | gaggagtgca gctgttggca tgagacctcc ttctccccag cctggggaag cagggaccag |
| 85201 | cagataatcc cgcccttccc tgagctgttg ctgttccctg ttgaagttcc ctgaagctca |
| 85261 | gccagctcat attttataaa aatgaattaa aacctccaaa aaaatcaagg ctaatatgag |
| 85321 | gtctgctccc agccccctgc caatgtcctc cttgtcatcc ctgtcttgtg actataacca |
| 85381 | caattaaagc ccatagcctt tgcagtgtga cctgggtctg cagttatctg caaggcttcc |
| 85441 | ccctaaggag ctggggtaca agctgacctg tgtttcctgt gggacctggg tctcacagcc |
| 85501 | ctcccagtgc tctcagagcc agagccactc cctcttcccc caggcatctg ttcccatccc |
| 85561 | ctgccacagg ctccagcatt ctggagtgac gtcaggatct tggcacatcc agtcctaggg |
| 85621 | tttccctctg tctctggcca gccctgagcc ccgtagccgt gagttctgcc caggccctgt |
| 85681 | gagctcacca gagccacaga ctcacagccc agaggtggct tcttccttca ggaactgaag |
| 85741 | aacccccatg aacaccaaca tctccaggtt ctgagaacag aacctgggaa attgatgact |
| 85801 | tcctcatgat gaccgatact caggatggcc ctagcgagag ctcccagatc atgaggtccc |
| 85861 | tcactcccct gatcaacagg gaggaggcat ttggggaggc tggggaggcg gggctgtggc |
| 85921 | ccagcatcac ccacactcct gattcacagg aagaaggcct gaacgacata caggagatga |
| 85981 | tcaaaacgga gaagtcctac cctgagcgtc gcctgcgggg cgtcctggag gagctgagct |
| 86041 | gtggctgctg gtgagaaggg aggggcggca ggtgggggga ggatgaggcg gaactggaca |
| 86101 | aaggggaccc tgccagggct gggcagatga ggaagaatct acagagcccc tgctggtcag |
| 86161 | gctcgctaaa ccccggctcg ccctaccccc agccgcttcc tctccctcgc tgacaaggac |
| 86221 | cagggccact catcccgcac caggcttgac cgggagcgcc tcaagtcctg catgagggag |
| 86281 | ctggtgagga cgcaactgga cggcgggggc tggagggagg gcctggttgt gagaaggtgt |
| 86341 | cacaaccccc tttgtcatgg cccgagctgt cccccagttg ctgggttcac tgacaccccc |
| 86401 | tccttcgcag gaaaacatgg ggcagcaggc caggatgctg cgggcccagg tgaagcggca |
| 86461 | cacggtgcgg gacaagctga ggctgtgcca gaacttcctg cagaagctgc gcttcctggc |
| 86521 | ggacgaggtg cggcccaagg ggtcggggct ttgcctcatc cagggctggc tctctggggc |
| 86581 | ccctcaggat cagggggctc aatcaggagg ctagaccccc ttacccactg cccctggcca |
| 86641 | ccccccaacc cccagcccca gcacagcatt cccgacatct tcatctggat gatgagcaac |
| 86701 | aacaagcgtg tcgcctatgc ccgtgtgccc tccaaggacc tgctcttctc catcgtggag |
| 86761 | gaggagactg gcaaggactg cgccaaggtc aagacgctct tccttaaggt gctggagggg |
| 86821 | gcaggatgga tgggggcctg ggtcctttca ggggagcagc agcccccacc tggggctgga |
| 86881 | agcctgagtg acagggtggg gccttcaagc agcaggtgct cagagaagag ccaagaatgg |
| 86941 | gaaggacgtg ggggaagggg tggggaagga ggtgggggaa ggggtggggg aaggggtggg |
| 87001 | gaaggaggtg ggggaagggg tgggggaagg ggtgggggaa ggggtgggga aggaggtggg |
| 87061 | ggaaggggtg ggggaagggg tggggaagga ggtgggggaa ggggtgaggg aaggggtggg |
| 87121 | ggaaggggtg gggaaggagg tgggggaagg ggtggggaag gaggtggggg aaggggtggg |
| 87181 | gaaggaggtg ggggaagggg tggggaaggg ggcatgacgg ccccctgccc atcctcctgc |
| 87241 | ctccaccgga ccccagccca gcgggatggc tgtgaagggg cagggcagct ctgaccaggg |
| 87301 | cctctgccgg cccctgcccc ttccccacct cttgggccct ggcagccgtc aggctcctgg |
| 87361 | tgaccccatg cccaccccca gctgccaggg aagcggggct tcggctcggc aggctggaca |
| 87421 | gtgcaggcca aggtggagct gtacctgtgg ctgggcctca gcaaacagcg caaggagttc |
| 87481 | ctgtgcggcc tgccctgtgg cttccaggag gtcaaggcag cccagggcct gggcctgcat |
| 87541 | gccttcccac ccgtcagcct ggtctacacc agtgagtgag gacccctcac tcgaagcctc |
| 87601 | acctgggagg gggccggagg ggctgcccat cctggaacct caggctgccc ttccccacag |
| 87661 | agaagcaggc gttccagctc cgagcgcaca tgtaccaggc ccgcagcctc tttgccgccg |
| 87721 | acagcagcgg actctcagac ccctttgccc gcgtcttctt catcaatcag agtcagtgca |
| 87781 | cagaggtgag ggcctgggag gagggagtgg ctctggcttt gagagcacca gaagcctgtg |
| 87841 | agcctgtggg gactggagcc tgtggggcct gtgagcctgt ggggcctgga gccacaggtc |
| 87901 | agccagtgcc ccggtttctc aggggaagcc ctgcagataa ctgcagcaga cgcgggtcac |
| 87961 | actggaaagg ctacgggctt tagctgtggt tatattcaca agacagggac gacaaggagg |
| 88021 | acattggcag ggggcttggg ccaaacctca tattagcctt gattttaaga tttctggaag |
| 88081 | aatcaagaca cctgtcactc ctgcccccag gttccgtgga agctgagtga gtaggggtgg |
| 88141 | cttctgtttg tgcatctgcc cccccctctg tcacttgtcc cctgtctccc catcccatgc |
| 88201 | tgcaggtgct gaatgagacc ctgtgtccca cctgggacca gatgctggtg ttcgacaacc |
| 88261 | tggagctcta tggtgaagct catgagctga gggacgatcc gcccatcatt gtcattgaaa |
| 88321 | tctatgacca ggattccatg gtatgggtgg gctctggtgc cagggacccc agcagcacca |
| 88381 | cacctggccc ttgttccctg cactccacct gcgctgaggc tgtgccctca cctccgccac |
| 88441 | ccacctgcag agctccttgg ccaggtgctg gctgggaagc tgggagtggg ggctgacatc |
| 88501 | tagctcctcc tgcctgcttg cggcagcctg accccttccc aggccagcac atcctcacct |
| 88561 | cctgtctcct acagactgag ccctggaggt gtgccagcaa gtcctgctgt cactagcctc |
| 88621 | cccaccccag ggctccccga cccctgccct cacctaccac aaccagtaac agccttgcca |
| 88681 | tcctccgtgg aggttctgga gcagggagta agggattggg gtgacccccg agagttagcg |
| 88741 | agccaccttc tcacatacca cctcagctgc tgaggtgccc agatagccct ggactagagg |
| 88801 | taggaggacc tcatgtctag tcctgagccg ggcatctgcc atttactgac tgcttggcct |
| 88861 | tgaacaagtc tttggtgggc cctgagactt ggtttcctca tctgtaaaat ggggtgatca |
| 88921 | cacctgtccc ttacaacaac tcatggcgct gtggtaagga ccaaacgaga tcacaggtgt |
| 88981 | ggacagcaag caccaagagg cttctgggtt gtctgttgcg tcagggcaaa gctgacttca |
| 89041 | tgggccggac cttcgccaaa cccctggtga agatggcaga cgaggcgtac tgcccacccc |
| 89101 | gcttcccacc tcagctcgag tactaccaga tctaccgtgg caacgccaca gctggagacc |
| 89161 | tgctggcggc cttcgagctg ctgcaggtgg gactgcaggg aagaggggct gaggcctggg |
| 89221 | gactggaggc tgggagttgg ggcctagggc tgggggctgg accctgaagg ctggggcctg |
| 89281 | gggtctgggg cctgggggtg gggcctgggg gctggaggct ggggcctggg gctgggggct |
| 89341 | ggggctgagg gctggggcct ggggcctggg gggttagggc ctgggcgtta ggtcctgggg |
| 89401 | gttggggcct ggagctgggg cctgggggct ggggcctagg ggcctctctc ctacccatcc |
| 89461 | tgaccaaagc tgggggcgtg gtccttaggg ggtttccctg tctccccaga tcatggcaaa |
| 89521 | caactcatgg ggaaagagac cctgtccctg ggctccccag tgtgtgacct gtgaccccca |
| 89581 | ttccccagat tggaccagca gggaaggctg acctgccccc catcaatggc ccggtggacg |
| 89641 | tggaccgagg tcccatcatg cccgtgccca tgggcatccg gcccgtgctc agcaagtacc |
| 89701 | gagtggaggt gcgagggctc tgtgtggccc ttcccttttg gatgaggagt ctgaggaccc |
| 89761 | aggaggggaa gtggcttgtc atccccctcc caccaccatc accaggagcc agcagcagac |
| 89821 | ccaggctcct gccccagccc agggcctgcc cccatctgca ccaagtcgca ctcccatgtc |
| 89881 | ccaggaccat gcccagccct cctgtctgca cccctgaccc tgcacccctt ctccgggcag |
| 89941 | ccccaccctc atccctggag aacgcctgcc cctcctctgc tctcctggcc ctgctcccac |
| 90001 | cctttgaaat ctggggtgaa ctactgccca tcccactgcc cggttcccta ttggatggtc |
| 90061 | cagcaccccc atggctggct cccttgacta aggggctctc ttctctgcac ccaccctcca |
| 90121 | acctctccca ggtgctgttc tggggcctac gggacctaaa gcgggtgaac ctggcccagg |
| 90181 | tggaccggcc acgggtggac atcgagtgtg cagggaaggg ggtgcagtcg tccctgatcc |
| 90241 | acaattataa gaagaacccc aacttcaaca ccctcgtcaa gtggtttgaa gtggtgagtg |
| 90301 | caggccctgg cggaggacat cctgtggcca gtgtggctcc actcagccag ccggcttcct |
| 90361 | ctgccccttc ttggaggctc aggctcctgt cgccaacacc ccaggacctc ccagagaacg |
| 90421 | agctgctgca cccgcccttg aacatccgtg tggtggactg ccgggccttc ggtcgctaca |
| 90481 | cactggtggg ctcccatgcc gtcagctccc tgcgacgctt catctaccgg cccccagacc |
| 90541 | gctcggcccc cagctggaac accacgggta tggccacatc caccctgcca ccaagcctgg |
| 90601 | ctccacgccc cccagggaag ggctccaggt ctccgcccag tccaagccgc gaccagagtt |
| 90661 | tgctctttgg ggccgagggg gtgggcatag aagaaggtca ccctggtggc caaggaaggc |
| 90721 | tgcccaaggt gacgccagct ctacagccag agagggcaga actggagaca gcctgggggg |
| 90781 | gcctgagggc agaaagcccc ttgcgctggt tgatggagaa gacccaggcc tccccgccac |
| 90841 | ctccctccca ccggcctccg cagcttcccc ttatctcggg ctctcttctt ccctccccat |
| 90901 | gcccatattt tctcccttga ctgcctgtcc ccctctccct cagaaagttc cagaatcagc |
| 90961 | tttagttctc cgcaccttcc tgccccgcca atctcactgt tcctcttgct ccttcctctg |
| 91021 | cctgtctgtc catctatcca tctgtccagt caggcttctc cggcgctgcc gtgtgctgtg |
| 91081 | caatgggggc tcctcctctc actccacagg ggaggttgtg gtgactatgg agccagaggt |
| 91141 | acccatcaag aaactggaga ccatggtgaa gctggacgcg gtaaggcggg tggggtcagc |
| 91201 | cccctgctgg ctgggaacat gcaacttcgt gtgacacatc ctgtgaacca gactatctgc |
| 91261 | cccgagagaa aaggacacta agagcctcct ttggcatgtg actgtcgggg gctgagcttg |
| 91321 | attgtgtgtc caaacagctc cctcctaata ctatcctgga atgcacacgc gtgcgtgtgg |
| 91381 | tatgtaaatg tgcatgtgtg tgcgcatgtg tgtggtgtgc atatgtgcat gtgtgtgtgc |
| 91441 | atgcatgtga tgtatgtgca tttgtgcgtg catgcgtatg tgtggtgtgc atatgtgcat |
| 91501 | cgtgcatgta tgcatgtggt gtatgtgcat gtgtgtgtgc atgtatgtgg ggtatgtgca |
| 91561 | tatgcacgtg cgtgcgtgtg gtgtgcacat gtgcatgcat gtgtggtgta tgttcatatg |
| 91621 | cacgtgcatg catgcatgtg gtatgagcat gtgcatgtat gtgtgcatgc gtatggtgtg |
| 91681 | catatgtgca tgtggtgtgt gcatatgtgt gtgcatgtgg tgtgtaaatg catatgtgca |
| 91741 | tgtgtgcagt gtgcatgcat gcgggtggta ggtaaatgtg catgagtgtg gtatatatgc |
| 91801 | atatatgtgt gcatgtgcgc ttgtgtgcat atgtgcatgt gtgcatgtgg tatgtaaatg |
| 91861 | tgcatgtgtg catgtgtgca tgtggtgtat gtgcatatat gtgtgcatgc atgcttgcgg |
| 91921 | tgtgcttatg tgcacatgcg tgcatacatg tgggtgtgtg catgtgcact ggcatgtggt |
| 91981 | atgtgtgtat gagagacaga gtgagccatc acagtttatt ataatcacct gctataattt |
| 92041 | ttactccaac aaatgacacc ataggtaatg attccttatg agatcatcag tgtcctttcc |
| 92101 | aaagagtccc tggttttcca tcccagccat tcacaaatga cacttccctg gcctgggtca |
| 92161 | gaggaggatt tccaggtgga agctccttat tcctcctggc tttgggccta ggactgttca |
| 92221 | tctgccagag agagaactgc catctggggg ttgggtgtgg aagtggcgta caagctgtag |
| 92281 | accctacagg gaagggcaga acgtgggcca gcctggaaca cagcccactg ttcctttggc |
| 92341 | cacccaaaga aacatcctca ctcagaccct ttgcagactc accagtcaga gtgctcttat |
| 92401 | taatgcaaag ttggccttgc gggcacaggg gctgccagca cacagtaatt tccatctcgg |
| 92461 | ctcctccaca caccctgtgc taggccactg cctgccactc caggccccag tggctgattc |
| 92521 | tgcccctgtc tccttggttc ctctgcagac ttctgaagct gttgtcaagg tggatgtggt |
| 92581 | gagtgtgggg gccatgcagg ggctctgggg tgagagggtc ctttattggc aatgatgtca |
| 92641 | ggccaaaggg tccagcatca gggacagagc cagccccagc ccccgcatgc ttgggccagc |
| 92701 | acacctcccc taagatgcag tggaaaagag ctgggtgagt gcaggactcg gtgccagtcc |
| 92761 | tgcttgggcg agtggatcgc actggcaggt cacaacactc tgtggcctgt ggcaccttct |
| 92821 | ccataaaata aggccctgcc ccttggacat gggtggcccc acagagcctc atggagccca |
| 92881 | aggcttcctg ctgacagatg gcggaatggg tggaggctct cgggattgtc caggcaggag |
| 92941 | gagtccatgt aggactctgg acctggccaa cctgcaggct gaggaggaga aggagaagaa |
| 93001 | gaagaagaag aagggcactg cggaggagcc agaggaggag gagccagacg agagcatgct |
| 93061 | ggactggtgg tccaagtact ttgcctccat tgacaccatg aaggaggtga gacctcgggt |
| 93121 | agggtgaggg gaggtgaccc cctccacact cagaccctcc tgtccagctt ctttcccacg |
| 93181 | gcccccaaga gctggatccc aactccattc atgtgagttt gggatggttt tgtctcacat |
| 93241 | ccttgaaatc ctagctcaga actcaccttc caagatgatg gtcccatcta ccttccctgc |
| 93301 | ttggttttct tttgtcctca ttgactcatt ccacaaatgc ctcttgggta tatgcgatga |
| 93361 | gccaggctcc atactaggtg ctatgggagc caaaagatgc cacacctgcc ctgatgggcc |
| 93421 | tccggtttac tgggcaaaat ggacatgtaa acagagactt agagaggact atgtgataac |
| 93481 | aaaggcaaat catggcttgg gggaatcagg gaaggcgtct cagaggaggt gacctttgtg |
| 93541 | gaaaaggaga aacatgttct cagaggccat aagggaacaa ctgcttatca gtagtcctta |
| 93601 | cgactcttct tcataatgtt ttattttaca catcttggtc atcggcacgt gaatgattct |
| 93661 | tcccctatta cacatatgtg ggttccatct gtttggccag attgcaagtt ccagaaagcg |
| 93721 | catttctctg ctttcttgtt tgtgtcctct ccacgctgcc tacctagctc agggtgctct |
| 93781 | gactggccac ctgaccagga gggacacatg cctgcagttg tgtttcctca gtggggccag |
| 93841 | agctgatcca gccacatcct ctcccaggcc ctttctgtga cccaagctag gtgtgatatt |
| 93901 | tattagagca cacattaagc tgctgtagca agttagagtg aagtgaacaa gacagcagtt |
| 93961 | tatttctcac ataacatctc agagagtggg ggttaggctg gtatggtggc tcagtggtgt |
| 94021 | caaggactaa gatcctgacc tcttgtttgt cacatctgta aggttggagg tgactcaaca |
| 94081 | tcatgttcta attcaagtgc acaggaaggg ttaaagagga gatgaggcat atgcttttct |
| 94141 | ttttcagggc ccaatccaga agctgcacat atgacttcca ctcacattga tcagaatcta |
| 94201 | gtcccttagc tacacttatc tgcaaaggag gctgggaaat gtaatctttc acaaggtggc |
| 94261 | tgtgtgctca gcaaaacttg taaaaatagg agaacagatc attgaggaca actggtagtc |
| 94321 | tcgtctccca ccatcaagtt ggccaggctg gagctgcaag aggctgcctg ttgtcgtctc |
| 94381 | tactcctgca attttcacag actgccacca ggtggcggtg gcgacttagt tgaaacctgg |
| 94441 | tttctagttt ctagtaagat ttattctcgt ttccagtaag atggggtgtg ctgagtgaaa |
| 94501 | gaaaatatag tacattttct tactgttata cttttgtaca ttaaaacaat ttattaatat |
| 94561 | cactaaaagc aacattaaaa tgcactgtac ttttttaagt agaaaatgta aatatttatt |
| 94621 | gcaaggtgtt atttcttttt tttttaaatt atactttaag ttctagggta catgtgcaca |
| 94681 | atgtgcaggt ttgttacata tgtatgcatg tgccatgttg gtgtgctaca cccattaact |
| 94741 | cgtcatttac agtgggtatt gctcctaatg ctatccctcc cctctccccc agcaccacca |
| 94801 | caggccccgg tgtgtgatgt tcccctccct gtgtccaagt gttctcattg ttcagttccc |
| 94861 | tcccatgagt gagaacatgc agtgtttggt tttctgtcct tgtgacagtt tcttcagaat |
| 94921 | gatggtttct ggcttcatcc atgtccctgc aaaggacatg aactcatcct tttttatggc |
| 94981 | tgcatagtat tccatggtgt atatgtgcca cagatgcata aacccctaag taccactagt |
| 95041 | cacactgtac acattataaa ctttttttaa cccacttaag cagagcacat ggtggacttg |
| 95101 | aaatgcagta gggaagattt tctacttcta gtgcattaag actggtctgg gcccacaatt |
| 95161 | tggggtcaac agactcctcc ccaggaaacc caccttctgt ccttttcatc tcatcttttg |
| 95221 | gcagcaactt cgacaacaag agccctctgg aattgacttg gaggagaagg aggaagtgga |
| 95281 | caataccgag ggtgagccct ggaacctgga actctgcctc ctcctccccg cccctgggtg |
| 95341 | gtcagctctc ctgcccacct catcacctgc ttctcttttc cctcctgcca gccctcccag |
| 95401 | ccttagtagc cagggaagca gcatcagtaa tccatgggca gtactgggca ggctaaggcc |
| 95461 | cttgtccagg gaggctttta ctctgaccag ttcagcaccc acagtgatgg gcagacattt |
| 95521 | agagccacag aacatcagag ctagaaggga cctcagagct cattccatcc agcattttcc |
| 95581 | agactctttt ccatgaagaa aattgatgga tgttctagaa ggaacaaatt agttttggtc |
| 95641 | aaattagttt aggaaaagct gattgaaaca gcttgttttg gtgcaggact tttcataccc |
| 95701 | tttactgtgc aaatgttatt atacatctct aaaaggaaga cacagtataa aatatttccc |
| 95761 | cagcttattg gatcacagta ccctttcttc taaagcatgc cagcagcatc tgcaccaggt |
| 95821 | gctccactga atgaggtttg ggaaatgcta atacagagtg ttattattat ggacaagaag |
| 95881 | agggaagcta gtgaggaaag tgagtgggca aggaactgcg cagcaacagg cctccacccc |
| 95941 | caaacccatg ctccttcctg cccctctctt ccaaagggca tgaagacagt cttcagacac |
| 96001 | cttcccgggc ataaacccac tggggccccc agcacctcca tgaggcgggc atgctaggga |
| 96061 | gtattatctg catttgacag cacatggaca tccgagagtt aagttagtaa agcaaattag |
| 96121 | cgacagagct gggtctcgaa tccaggcctt cctgctctgc tcatttctgc tccacctcct |
| 96181 | tttctgcttc tggccaggcc tgaaggggtc aatgaagggc aaggagaagg caagggctgc |
| 96241 | caaagaggag aagaagaaga aaactcagag ctctggctct ggccaggggt ccgaggcccc |
| 96301 | cgagaagaag aaacccaaga ttgatgagct taaggtgaga gcctaggagc agacccttct |
| 96361 | agggtgtgtg ggggcgggaa gaggggggcg cagtgatcct gcaggtgggg caggacaaaa |
| 96421 | gccagagacc aggcagccgc cccctaacag cctggtctgt ctcaggtata ccccaaagag |
| 96481 | ctggagtccg agtttgataa ctttgaggac tggctgcaca ctttcaactt gcttcggggc |
| 96541 | aagaccgggg atgatgagga tggctccacc gaggaggagc gcattgtggg acgcttcaag |
| 96601 | gtcaggccag gagcacgggc ccagcctgag cacccgccag cccttgcccc ccccacaggt |
| 96661 | tcccccactc acctcccacc actgccccgg ccactgcctc cagaagccct ggactctccc |
| 96721 | atgactcagc agttaaaggg tgaaggccct gccacatcag ggtccagccc tcctggtgct |
| 96781 | gttagctatt ttgaatgcca cccttgccag gcaaacctac accctgaccc acatttgtct |
| 96841 | tgcccagggc tccctctgcg tgtacaaagt gccactccca gaggacgtgt cccgggaagc |
| 96901 | cggctacgac tccacctacg gcatgttcca gggcatcccg agcaatgacc ccatcaatgt |
| 96961 | gctggtccga gtctatgtgg tccgggtgag actcccgtcg ctttccctcc ttgcaagtct |
| 97021 | cctcatcctc ccatctggga gagagcaaag aagctgcata ctggccaggt gcaatggttt |
| 97081 | acgcctgtaa tcccagcact ttgggaggcc aaggcaggag gatcacctga ggtcaggagt |
| 97141 | tcgagaccag cctggccaac atggttaaac cccgtctcta ctaaaaatac aaaaattagc |
| 97201 | caggcacagt gccacgcacc tgtaatccca gctactgagg aggctgaggc aggaaaatcg |
| 97261 | cttgaacctg ggaggtggag cttgcagtga gctgagatca cgtcattgca ctccagcctg |
| 97321 | ggagacagag cgagactctg tctcaaagga aaaaaaaaag aagaagaagc tgcatactga |
| 97381 | cagccccaga ctgggaggca ccagggagat catttggtct agtctttatc ttttctagag |
| 97441 | gaagaagtca acgcccagag aggggtagcc acttgcctag ggtcacacag caagcctcct |
| 97501 | gaggggtcca gtgctcctgc ccctgccctt cactgtcata ggaccctcag gcagcctggc |
| 97561 | aggggcactg aagatgagca gggcatggga gcctgctcag gcagcccttc tccccattcc |
| 97621 | aggccacgga cctgcaccct gctgacatca acggcaaagc tgacccctac atcgccatcc |
| 97681 | ggctaggcaa gactgacatc cgcgacaagg agaactacat ctccaagcag ctcaaccctg |
| 97741 | tctttgggaa gtaaggcttc ttggtgccct cccctgccac acccctactt ctccaaccca |
| 97801 | gaacacctcc caccctagcc aatccttaag cccttctcct aactccaccc caccaggtcc |
| 97861 | tttgacatcg aggcctcctt ccccatggaa tccatgctga cggtggctgt gtatgactgg |
| 97921 | gacctggtgg gcactgatga cctcattggg gaaaccaaga tcgacctgga gaaccgcttc |
| 97981 | tacagcaagc accgcgccac ctgcggcatc gcccagacct actccacgta tgtggggcat |
| 98041 | ggggcagagg gcgggggcag tgtgcctgct ttgcctccac tctaaaatga gattcagatc |
| 98101 | ctggtgattt gagaggttag acattgtggt ttctgtccca ggccaggcct ctgcccctac |
| 98161 | agtccctggg cacagtcttc aggggacagg actgcagatc ccaaaacaag gagagggaca |
| 98221 | gtggattcca ggacagagga ggcaggacga ggagagacaa gtgggctagg gaaggtgggg |
| 98281 | gctagcaaga ggaggacaga aagagtcccc tggggatctg ggccagctct gccacttata |
| 98341 | ggctgtgtga ccctggccaa gtcccttcac ctctctggtt ttcagtttcc tcatgggagt |
| 98401 | ctctgaggtt ccagaggagt gggcacagtg aggggatgca gtggggctag gctggggaca |
| 98461 | ctgatatgtg gtccaaggcc cagggcagga aggttcagcc tccagcagcc ctagtgtctc |
| 98521 | aggtgagcct ggggcccagg gcaggaggaa tcaggctcac ttgctgatga gggcaacagc |
| 98581 | caactttaga gaactggcca cgaccagctg tcatccagga tggcttagtc ccacccagcc |
| 98641 | cctccaagcc tgtgtgtccc ctcccacaga catggctaca atatctggcg ggaccccatg |
| 98701 | aagcccagcc agatcctgac ccgcctctgc aaagacggca aagtggacgg cccccacttt |
| 98761 | gggccccctg ggagagtgaa ggtggccaac cgcgtcttca ctgggccctc tgagattgag |
| 98821 | gacgagaacg gtaatggggc actggatgca gccgcctgcc ccctctccag ggggtttcag |
| 98881 | aggccaggag gggcccacac ttccctgggg aacctcacag cctagcctgg ggtgtcctca |
| 98941 | gcctaaacct ggtcttagtg accctctgct catcacccca gagccccgtt cctgtctgcc |
| 99001 | cagcctctgt gcttccaccc ctcctacagg gcagccccac ctgctttctc tctgtccaaa |
| 99061 | tcccagtgag gtagagaggc tatctgcatc ccattctgca gataaacaaa ccaagatcct |
| 99121 | acttctagtg actcgcccaa ggtcatgtgg ctctttagag gcagagcgag ggcatcggcc |
| 99181 | caggtccatc tggctctaat ccttaaactc tccttacttc tctgtccatg aggcacttcc |
| 99241 | cagagaagca gagaattggg aggtgtctgt gctggtatct gatcactttc aggtgctggg |
| 99301 | acaggaagtg gattctcccc tccctgaccc ttctctcagc ccagcagggc tctccagtca |
| 99361 | acttccccaa gcagaggacc aagggcacag acctctcttg gccctgtggg gcagctgaga |
| 99421 | ccctgggcaa gccacttctc cttctgtgcc tcagtttccc caacagtgaa aaggaggtgg |
| 99481 | ggtagacagg tgatggcata gaggcttctt tgtgctccta agtccctagt cccagcaaag |
| 99541 | gtcttctggt tctgctgagc catgtgtgca gctgagccgc cggcacccac aggtcagagg |
| 99601 | aagcccacag acgagcatgt ggcgctgttg gccctgaggc actgggagga catcccccgc |
| 99661 | gcaggctgcc gcctggtgcc agagcatgtg gagacgaggc cgctgctcaa ccccgacaag |
| 99721 | ccgggcatcg agcaggtgac acttgcatgg ccaagactgg ggttcttggg tattggggac |
| 99781 | cagggatccc caacctgagt cagtaaaggt agaagccagg cctcacgctg tccgctgcat |
| 99841 | tccagaaagc ctggcaggca ccttcccacc aaggcccctc agggtaactt gaatggcaag |
| 99901 | ggtctttgct ttgagtgaga attacatcag ctcaggcaga gacctgggtt gtctccctca |
| 99961 | gaagctgtga ttggctattg gtgacatcat aggaattcct ggcatccaaa gatggaaact |
| 100021 | gatgaactgg gtccttgaca gaacaaaggt taggagggag aggagagctg atcttcctgg |
| 100081 | gcagagggag aaggccctgg gagatctgcc acaaccctct tcctcagggc cgcctggagc |
| 100141 | tgtgggtgga catgttcccc atggacatgc cagcccctgg gacgcctctg gacatctcac |
| 100201 | ctcggaagcc caagaagtga gcggcctggg gcccagcgct actcccttcc ggcccacccc |
| 100261 | acccacttcc caccacggcc caacccttcc tgcggggggc tcaggtccag atggccttgg |
| 100321 | ccagttggca tccctggggc ctgggtgtgg ccactgggcc ttatagggga gaaactgacc |
| 100381 | aaccaatcga tagagtttag ggcctgccct ggagagtccc cacgtgctaa ggcaggacaa |
| 100441 | cgccttccac cctgcatcag tgagcgagac aagccccaca cagcacactc cggtgcattg |
| 100501 | tatctacacg gtctacgcgc ccatacacat gcatctcatg cacacacaca cacacagcat |
| 100561 | agcactccca cggacaccca cacacatgcc cacactgacg cactccttca caacacacag |
| 100621 | aacccctggg agccggccct gcgtcatcct cacatccagg ctagtgtgat gttccgccaa |
| 100681 | gttttctttg gagtgcctgc cagtgatgaa tccaggagtg agtgcctgga agaggcagga |
| 100741 | ggtggtagag tgaaaagaac ccgggtttcc catccataaa gcggcaggtt caagtccagc |
| 100801 | tgtcagacag tgactggatt cagggccagc ttcagggatg gaggaagcca cacagggtcc |
| 100861 | cactcttgtt tccatgctcc tatgttgcca tcttgaaatt ctttatgaca agtgaccctg |
| 100921 | catttccatt tggcgctggc cccagcaaat catgcagcaa attctgccag gaatgtcctg |
| 100981 | gaaacctgag gccatgagtc agctgttcca gggcctgtca ttagggggca cccaactcac |
| 101041 | tgggccactc tgggctcgca gccctgtctg caatcccagg agagccatgc tcagatcaat |
| 101101 | ttttagtgaa tgactcagcc tcactcttaa tgattgaaat gaactacatc attcataatt |
| 101161 | acaattaaac cttgagggga aaatcctctt tggggacagg gacatacagc ttccatgggc |
| 101221 | ttccattgct ggctactggg cttaaatgca gacttctctt ggaactagca tctgagacag |
| 101281 | agggtggctt cctcccctca ccccaccccc accgcccaca gccatgtgcc tggtgggcct |
| 101341 | tctcactcat gcctctgctc ccccaacccc aaaccactcc tccagcccca gcctggccca |
| 101401 | ggccctgtgc tgaccccaag accccagggc ttctctccgc ctgccccatc ccagccctgg |
| 101461 | caccctggca taacccccac ctggggctgc taaccagcct tctctccctg ggcccaggta |
| 101521 | cgagctgcgg gtcatcatct ggaacacaga tgaggtggtc ttggaggacg acgacttctt |
| 101581 | cacaggggag aagtccagtg acatcttcgt gagggggtgg gtgagcagtc cctgcatggg |
| 101641 | agggactgag ctgggtgggg cttgcttccc ggggggcagg agaggaggca gagggaaggt |
| 101701 | ggctgtgggt gggagaggcc ccaccagcct ggctgcgggt ctggagatgt ggcgcccaca |
| 101761 | ggtggctgaa gggccagcag gaggacaagc aggacacaga cgtccactac cactccctca |
| 101821 | ctggcgaggg caacttcaac tggcgctacc tgttcccctt cgactacctg gcggcggagg |
| 101881 | agaagatcgt catctccaag aaggagtcca tgttctcctg ggacgagacc gagtacaaga |
| 101941 | tccccgcgcg gctcaccctg cagatctggg atgcggacca cttctccgct gacgacttcc |
| 102001 | tgggtgcaga gcagggcagg gatgggggtt caggatccag aactgagaag aggcaggggc |
| 102061 | cgggttggcg gggacaggga gagccctgcc ttggggggac aaggggtcat tgcttccagt |
| 102121 | ccatcagagc caggggtgtc cgacggggtt ccgcccccaa ggacccacct aaccgtccct |
| 102181 | aggcagatgt tctcagtgtc ataaccaggc tgacaacaag ctttggacac accaaggagg |
| 102241 | gggcagtcag tgatgatggg ggaggggaga ggctccctaa gggagtcggg aaacctccct |
| 102301 | gggcctcagg ttgcttctct gtaaagcagg gattctccct aaaactctaa tctgcatctg |
| 102361 | caaaagcttg tgggattagc aggactttga cagaatggat gcatggcagg gagtggcagg |
| 102421 | ggagacccca ggagagaccc tctggggtga aagaaggacc tgagtaaagc atgggggctg |
| 102481 | gggctgccta gcaagcccac gaggatgcct gcattgaggc cagttgctgg gagtgaggca |
| 102541 | ggaggatgag atgtgggctc agggaggtct gcactcagca aacaaggggc cgaggagccc |
| 102601 | agacccccac ccccaccccg ccccacccca gccctgttca ctctgagctg acactgaggt |
| 102661 | tgccacaggg gccatcgagc tggacctgaa ccggttcccg cggggcgcaa agacagccaa |
| 102721 | gcagtgcacc atggagatgg ccaccgggga ggtggacgtg cccctcgtgt ccatcttcaa |
| 102781 | gcaaaagcgc gtcaaaggct ggtggcccct cctggcccgc aatgagaacg atgagtttga |
| 102841 | gctcacggtg cgcacccctt cctgctcggg cagtaggcag ggctgggact ggctggggtg |
| 102901 | ccaagggccc agcacgcagc ctggacgctg ggacctgtct gtcctctgca gggcaaggtg |
| 102961 | gaggctgagc tgcatttact gacagcagag gaggcagaga agaacccagt gggcctggcc |
| 103021 | cgcaatgaac ctgaccccct agagaaaccc aagtgagtgc cctgccggcc cagcccctcc |
| 103081 | ccactctggc tcttggaggc gctggaacag gaaggagacg atccccagac accccatctc |
| 103141 | ttcctgggcc acagcctcat tacaggggag cctcctccct gccctctgcc aaccctgaat |
| 103201 | cccacaacgt ccctttgaac cagaggatgg gctaggaata ctggagagca ggaccttccc |
| 103261 | tgggaaaggc cccatctagc ggagagaaac tatgctcttc ccttcctagc ttttgcagaa |
| 103321 | gagccagctc cagtggtggc ctctggggcc atggccagcc ttgatggcca gaggggtgcc |
| 103381 | tagaactgca cacacagccc aggacagctt ccctcttggt cttggcccct cgccacaccc |
| 103441 | aatcccttct cctccctgtc cctcctctgc gctctctacc cttcatactc cagccggccc |
| 103501 | gacacgagct tcatctggtt cctgaaccct ctcaagtcgg ctcgctactt cttgtggcac |
| 103561 | acgtatcgct ggctgctcct caaactgttg ctgctcctgc tgctgctcct cctcctcgcc |
| 103621 | ctgttcctct actctgtgcc tggctacctg gtcaagaaaa tcctcggggc ctgagcccag |
| 103681 | tggcctcctg ggtctgatat ttcttacttc ttcctctgga ccaagggcta ggcaggcgcg |
| 103741 | tgcacacaca cacatataca cgcacacatc cacaaacaca aatatgcata catgtgcaca |
| 103801 | caaacacaca caagcatgta tgcacacatg tgccacgcac aagtgcatac acatgcactc |
| 103861 | aagcacacac aggcacacac ttaagcccac acaaacatgc acagcaactt tcaagctttc |
| 103921 | atgacagaat agactctcag aactagaaat gactatttta cacttttcca cattaagcca |
| 103981 | aagaggtgaa gtagcttgct caaggttacc cagcaaatta gggtagagcc gggactcaag |
| 104041 | ccaaggtttc caaatttcca atcctgtgtt ctttgcacac cacctctgct cccagccatg |
| 104101 | tttctcccag actgtaaccc aatttttttt tttttttttt ttttttggag acagagtctc |
| 104161 | gctctgtcgc ccaggctaga gtgcagtggc acaatcttgg ctcactgcca gctccgcctc |
| 104221 | ccgggttcac gccattctcc tgcctcagcc tcctgagtag ctgggactac aggcacccgc |
| 104281 | caccacgcct ggataatttt ttgtattttt agtagagacg gggtttcact gtgttagcca |
| 104341 | ggatggtctc gatctcctga cctcgtgatc cgcccatctc ggcctcccaa agtgctggga |
| 104401 | ttacaggcgt gagccaccgc gcccagccga ctctaaccca atttcattgg cagaaagaag |
| 104461 | ctgagctatg gacagggaaa agggaagggt gtggccaggg ttagccaaca ggtctggaaa |
| 104521 | tggctctcac ccgtgtgtga cctcccagtc cagggctgtt gttttctgcc cttcaggata |
| 104581 | ataattccat tcaactcaaa catttcatag ccaccatggc ctgaacaccc aactgcaggt |
| 104641 | gctcagagct ccccaggcac tggctcactg tgccattgcg ccaaacccag gaggtaggta |
| 104701 | ctgcttgtaa ccccatttta tacatgaaga aaccgaggtt gatagaggtg cctcacttgc |
| 104761 | ctgtgaaaac cattcaaaac caggtgccct gcacccaagc cccggctctg tgtccccacc |
| 104821 | aatactgagc tcagctctgg ggctgcacgc catgtcctct gggaggcagt agtttgaaaa |
| 104881 | tgcatatgca gtactttcac ttgtatcttg acattttaca aaacctattg tttttataac |
| 104941 | acaaacgaca gatagtgagg ctggccaggt gcttctcggc tgggaggctc tacagaaggt |
| 105001 | ggagtgggtc ttcatcctga gagtgggcag gtcggtgagg gcagcttgca ccccacaggg |
| 105061 | gctgctcaga ccctcagcag ggcccggtgg gaacagccat ttatgtccat cagaaaggaa |
| 105121 | gaggttgtga agcaccagtc ttaccaagga cgtggggcag cacatagaac gagctaaccg |
| 105181 | caggagcttc ctaacgatga gaactgcctg cagggccaag gctgccccat gctgcaagta |
| 105241 | gctcccatct aggccttagg aggagattcg ggccccaaag gtgctgcagg gaggatagag |
| 105301 | ttttgtaagc agcaagtcgg gtacttagaa atgggtttaa accctggctc cagcattcac |
| 105361 | tgcttttggg gctggggcca tggcagggct tttgggggtc cagaaggaca gaggatgggg |
| 105421 | tgcactggga ggcagctcct gcccactggc tgaccggctc ctctcttcca cttcccagcc |
| 105481 | ggcccgacac ggccttcgtc tggttcctca accctctcaa gtccatcaag tacctcatct |
| 105541 | gcacccggta caagtggctc atcatcaaga tcgtgctggc gctgttgggg ctgctcatgt |
| 105601 | tggggctctt cctctacagc ctccctggct acatggtcaa aaagctcctt ggggcatgaa |
| 105661 | ggccgccagc tcccgccagc cgctccccag ccctgccgca tttcctttca gtggcttgga |
| 105721 | ctctttccca tctcccctgg ggagcctgag gagcccagcg tccactcttc atgccttggg |
| 105781 | ccgagcctgc ctcctgcttg cgggggccgc ctgtcctcac tgccccaggc tgcggcttgc |
| 105841 | ccagtcccgc ccctctgacc cctgcctgtg ggctggggag ccttggatgg ggtggggacc |
| 105901 | tggaatgggt ctctcttgcc ccacctggct gaggcgccac ccttcttcag gcccaggctc |
| 105961 | cagaggaaga ctcctgaaac cctccccagg tcttccaagt acaggattga agctttagtg |
| 106021 | aaattaacca aggaccatgg gtcagtgccc agggctttaa aaagaatgaa cgagcaaaag |
| 106081 | gtatccccgc cgtgacccct gcagatagca ccggtctttg atccgcagca ggggccagac |
| 106141 | cctgcccaca agtcccagcg cggctgcttc tgccactgct gggctccact tggctcctct |
| 106201 | cacttcccag ggggtcgcct gtcctgcctg tgggtttcca tggcttccca gagctccctc |
| 106261 | tgccccagcc agcgcctcca ggcccagctg aggagctgtg agaagcagca gaggggactc |
| 106321 | cccatcccgg gcacaccctg tcctcccacc cctgccccct tgcccttcca gccctttcag |
| 106381 | ctgcagctgg gagctggccc gtcaagtgct gcccctgcct gtgtctgggt ttctgttggc |
| 106441 | tgtttttctt ttcttgagtg gtgatttttc tctaaataaa agaagtcaag cactgagctg |
| 106501 | acaggtctgc actggtcaag ctgagaggag cagccgcagg tgcggggcag aggcagcagt |
| 106561 | tctctaggct ggcagattca gtaccagcag ggctcccatg gcctttcccc ttcaagtggc |
| 106621 | ctctggtggc ccagggttca aggcaggcct caggcacagg gctgcccacc caggctgccc |
| 106681 | acaggaggag tcttacacca tagcccaaag ggcacaccag cctgggccca ggggccccca |
| 106741 | aagcaccgaa agaatccttc aggtctgggg ccagtctgaa ggcttaaggc cccacaaggg |
| 106801 | cccaaaagct ctagcctcca cccacagaaa ccagttcccc tgaaagcaag aaaggagccc |
| 106861 | cacgctactg gcctcggcct ctgactcaca ccactatctg agcctggggc aaagtcccct |
| 106921 | catgacacag aggtaggggc aagggcctgg tcttgctaga cctgacctct ttaaagagat |
| 106981 | tcagccacaa ctttaaaagg ctttaatcat aatgcaggac acaggtaact cctctggctc |
| 107041 | cttatttcga caggctataa agacagccct ggaaaatcca gagagcaggc ccaggtgcgg |
| 107101 | cccagtgggt gatatgagct ggctccggca cagacaccag catcaggcca gccctaacac |
| 107161 | atcagccttt ggcggtccag ctcattttgt gggtacccgc aacacctgag tgggaggaac |
| 107221 | ttgcagttca gagttgatct ggaaaagaaa gggtgaaagt cgttacattt ttcccagggc |
| 107281 | cctccttctt tgccaccctt gcgagccacg ctggctctcc catgggcctc caaagccctg |
| 107341 | cacgcatctc ctctccaaag ctgagagatg ctgaacaccc acagactgcc tccctgcagg |
| 107401 | agacacgcct gagccttctt gctcagcttc tgctccagct gtgacctctg gtagcgttct |
| 107461 | tcatctcccg cccgtccatt ctctgcagtc ttcccctctc ctctctccac gcacccatgc |
| 107521 | catccccaat ctagcctgcc ccacctcttc ctcccccagc ctcttgtata cagtagcatc |
| 107581 | tgtggaagcg ggaaccatac cgtccagaat gtctgggtcc tgtcacaggc caagggtcat |
| 107641 | tatgaggcca aggttcacta caacatccca ctttcagctg tggcctggga cctgggactg |
| 107701 | tgctggggcc acgcagcccc tgtggctgga cttggagctg gcctcagtca cctcacacgt |
| 107761 | gtgcaactaa cagctgcgtc acgaccttcc tggcctacag ccccagctgc aggtgcccac |
| 107821 | acccgcagag caggaaatgt cagcaatgga ctttttcctt cctcctcttg ccaggccatg |
| 107881 | gggaagttgt ccacaactat tgcagggttg ggcacagatg ggggccaggg aatatctgcc |
| 107941 | ccagcagagc ctccttcccc atgcgaggat gaccctccag tcatatccca ggcagggaac |
| 108001 | cggggctggt gggtggaaag agcccaggct ctggacgagt tgcaaactct gcaagttgtg |
| 108061 | attgtccttt gtgtgaaatg aggagcattg tttccgccct gtccacctca cacagcgggt |
| 108121 | gtgaggatgg aagaagagag cacagctgga ggctctgtag ctggggagct gctcctggct |
| 108181 | gtggcactgc ttcacacaga gcagtcccag ctggccactg gcaccagaaa ccacagtatc |
| 108241 | aaagagacac tgtcacacct gagctgtcct ggaggagact tcaggcaaga tctactcctt |
| 108301 | tggccagtag ttgtctcaag gtgccactct tgatttttta catcatatca caaagctccc |
| 108361 | ttgcctctga cggggagggg actcctcgtt ccctaatccc agctccagtg cccctgcccc |
| 108421 | acccgtgtct cccgctgccc ctccttggaa ggccccgccg cccaccttgg agttcagata |
| 108481 | ctgctgcagt agcgcc |

### Norrin Cystine Knot Growth Factor (NDP)

[0132] The NDP gene encodes “norrin cystine knot growth factor” (NDP). The human ND gene is located on chromosome Xp11.3. It contains 3 exons, encompassing kilobases (kb) (NCBI Accession No. NG_009832.1). NDP encodes secreted norrin protein that plays a role in retina vascularization of Wnt signaling pathway through (FZDA) and (LRP5) coreceptor. Mutations in NDP have been associated with Norrie Disease Pseudoglioma, an X-linked recessive syndromic hearing loss that is characterized by early childhood retinopathy. About one third of individuals with Norrie disease develop progressive hearing loss, and more than half experience developmental delays in motor skills.

[0133] Various mutations in the NDP gene have been associated with hearing loss (e.g., Norrie Disease Pseudoglioma). For example, the p.His4ArgfsX21, p.Asp23GlufsX9, p.Arg38Cys, p.Ile48ValfsX55, p.His50Asp, p.Ser57*, p.Cys93Arg, p.Lys104Gln, p.Gly113Asp, p.Arg121G1n, and p.Cys126Arg mutation have each been associated with Norrie disease pseudoglioma. See, e.g., Musada et al., Mol. Vis. 22:491-502, 2016; Chamney et al., Eye (Lond) 25(12):1658, 2011; Liu et al., J Chin. Med. Assoc. 79(11):633-638, 2016; and Parzefall et al., Audiol. Neurootol. 19(3):203-209, 2014.

[0134] Methods of detecting mutations in a gene are well-known in the art. Non-limiting examples of such techniques include: real-time polymerase chain reaction (RT-PCR), PCR, sequencing, Southern blotting, and Northern blotting.

[0135] An exemplary human wildtype NDP protein is or includes the sequence of SEQ ID NO: 20, SEQ ID NO: 21, SEQ ID NO: 25, SEQ ID NO: 26, or SEQ ID NO: 27. Non-limiting examples of nucleic acid encoding a wildtype NDP protein are or include SEQ ID NO: 21, SEQ ID NO: 22 or SEQ ID NO: 24. As can be appreciated in the art, at least some or all of the codons in SEQ ID NO: 21, SEQ ID NO: 22 or SEQ ID NO: 24 can be codon-optimized to allow for optimal expression in a non-human mammal.

Human Mature NDP Protein (NCBI Accession No. NP_000257.1)
(SEQ ID NO: 20)
MKTDSSFIMDSDPRRCMRHHYVDSISHPLYKCSSKMVLLARCEGHCSQASRSEPLVSFSTVLKQPFRSSCH
CCRPQTSKLKALRLRCSGGMRLTATYRYILSCHCEECNS
Human Mature NDP cDNA
(SEQ ID NO: 21)
atgaaaacggacagctcattcataatggactcggaccctcgacgctgcatgaggcaccactatgtggattc
tatcagtcacccattgtacaagtgtagctcaaagatggtgctcctggccaggtgcgaggggcactgcagcc
aggcgtcacgctccgagcctttggtgtcgttcagcactgtcctcaagcaacccttccgttcctcctgtcac
tgctgccggccccagacttccaagctgaaggcactgcggctgcgatgctcagggggcatgcgactcactgc
cacctaccggtacatcctctcctgtcactgcgaggaatgcaattcc

[0136] A non-limiting example of a human wildtype NDP genomic DNA sequence is SEQ ID NO: 22. The exons in SEQ ID NO: 22 are: nucleotide positions 1-87 (exon 1); nucleotide positions 88-468 (exon 2) and nucleotide positions 469-1719 (exon 3).

| Human NDP Gene Sequence (NCBI Reference Sequence: NG_009832.1) | |
|---|---|
| (SEQ ID NO: 22) | |
| 1 | aagatgctcc gtggaaggga gccgagcggt gggcagaggc tgagtccccg ataacgagcg |
| 61 | cctcacattt ccgtggcatt cccatttgct agtgcgctgc tgcggccgca cgcctgattg |
| 121 | atatatgact gcaatggcac ttttccattt gacattctct ctctctctct ccctctctct |
| 181 | ctctccctct ctctctccct ctctctctct ccctgtgtcg cttaaacaac agtcctaact |
| 241 | tttgtgtgtt gcaaatataa aaggcaagcc atgtgacaga gggacagaag aacaaaagca |
| 301 | tttggaagta acaggacctc tttctagctc tcagaaaagt ctgagaagaa aggagccctg |
| 361 | cgttccccta aggtaagcag gaaaacaagc gctgccggct tgcctaggaa atcgcttctt |
| 421 | tccaaaccga gcatttcatc ctcctctcag acaaagagac aacctttaaa taccacttaa |
| 481 | atttgcatta ctttaatttg cattaatctg tagcatgcta gcattgtgtt tcttaaatga |
| 541 | acgggtcttt gaagtctgtg acagagcagg gagcctccta gaaaagcttg aaaatatctt |
| 601 | ttggtttgac ttaaagagat ttttcttttc aaactctctg cgtagttaga tgtaactttg |
| 661 | tgatggttct tatagttgac cccgtgaaag ggggctgcga agcagcaact tgccaacatg |
| 721 | gattcatgga gcccagtatc ttccccagca ccctcatccc acttacaatg ggggcactat |
| 781 | taacgcaggc aagactgcga gtttaaaagc gcactgttta cttttattac tacttatgta |
| 841 | tgctgctgat ctcctgccag ggctctgccg gagtgctcag aatgacttca aacaataggc |
| 901 | aacatttatt tctagctttc tgtgtcacgc tttgcaggaa tcctgctccc ttgcactctt |
| 961 | ctttcagcgt gcaggtcttc gcttccatag atgcattggg gagcaccggg aggagatgag |
| 1021 | gatggattta ctgtatgatt ttgattgggc aaaaagtccg aggaaatgca tgctgtttgc |
| 1081 | cttggactta ttgcaggggg ttatttttag tcatcagctc gtccctgcag catgatgttc |
| 1141 | aaggagtgac cgggaaagga tgctcccacc agcacagaga ccaggacctg taggaatgac |
| 1201 | tcctacctgc gggatattcc gaggtttctt tcaaactttg gaatacaagt tctctcttta |
| 1261 | aatgaacaat tgagctgtag gaggcctggg cataactctt tcttggggga cgggaagttt |
| 1321 | gattgtgtac agaatgttaa tgactcagaa cgcccagtaa ctgaggctca ttgtaataga |
| 1381 | caaacccaga taagcctcca tgagaggcag actcccatct ttactgagat tcaggtgcgg |
| 1441 | gaaaggaagc tatttggcaa gatgggagtc ccttgtacag ttctttgtaa ctcattaata |
| 1501 | acagatatgg ctgctgtgaa acatgtctct tttcatttct aatattagtg tattttaatt |
| 1561 | acaaggagct ggcattggca aattacccca acacataaga ttaaatacca ggtgcatttg |
| 1621 | aaaacagaga gatgactgaa atggggagtt gctgtgggtg tcaaccaaat acagcgggga |
| 1681 | cggcacaatg cttctcaact gagcgtttaa accagatgca aatatctgct cattttcttc |
| 1741 | tcatcagtct tactaattca aggaaacttt atggtcctgt ttgccagttt tcattgcaaa |
| 1801 | ttggtacaca gtttatgcaa aacttttctg attttctctg ataaccagcc caataagcat |
| 1861 | cgctgaatga aaatctgata tttgaatagg ttaatttaca actttggggt attcattagt |
| 1921 | caagaaagcc ataaaagaca ctatggattc cattgctgta aaattttatt gtaatttttt |
| 1981 | tttaaaaaaa ctgcggttag caaagcattt agctgaatca aaacaatttt cttagactat |
| 2041 | tattcagatc attacatgag agtatttgaa cacaaaatgc aatgttttgc atcatttatt |
| 2101 | ttaaaataca tttggttcag gtaacgggag aactggctga ggccttctta cgactgtgta |
| 2161 | ccaagcagct gacacccaca gatggaaatg tgcctgtgga gttttcaatc ttaattcgag |
| 2221 | ttccaatgac actgtcaagg gaaaaataaa tcatttttca atacatttaa caatttccaa |
| 2281 | ctcatttatt ttcctgggcc cttgaaaaat gtggtgagtt tcttggaatt atagccacca |
| 2341 | atggtggcca gcaatcttta ttttaagaac tcacaattca agtactatta ttctctggtt |
| 2401 | aattatttat ttcatcaatt tttaaataaa tatttattaa gcattttcta gatgcccagt |
| 2461 | gctatgctag tcccgatgga tgcaaaggtg aatgagacat tgtcccatac tctaattctc |
| 2521 | agtccatatg ccatctctag ttagattttg gaactgaaat gggcattgcc aatgggtaaa |
| 2581 | gtgggcaata actttcctgt tataaagaat tatttaaaac agctactggt ttctagattt |
| 2641 | acttgaaatg attctcactc atcagtgggt tttctttcca tttatgatta agggattccc |
| 2701 | ctttggcctt tttcaccaga tcctgggtac acgtcatttg cacagctaac acggctagat |
| 2761 | ctttccagcc tgggtagaag aatcccggaa aaagacagta gtttatcctt tctctgctct |
| 2821 | cctgagcacc ctgtggaaag gaccatatgc tgtctctatt ggggatgggt gtgagtcgcc |
| 2881 | tactcagtag ctaacatcag ggccacttga tgaatcatcg aattagaaac atgcatatgg |
| 2941 | aggaagatgc agtcactatc cctcaccact tacttgtccc acccccagta tcaaaacaaa |
| 3001 | tgacctctgg gcctggccta aattcaagag gcccctggga agaagctgtt ggaaactctt |
| 3061 | ccccaaaccc aggtctccat catagccaca cagtgttgct ttcaaataac ccagtatggt |
| 3121 | gttttatcac gtgtttaggt tactggggga aaaaaaaaac cctgaaaaca gcatcaccag |
| 3181 | ggtccttgac ttggtcctta tcagcagata atcccccgtg gttggattaa aatgcctctg |
| 3241 | actccctggg gtgcctgact caccctagcc agccctcagc ttcttggcca gcggccttcg |
| 3301 | agcccatcct cacctcttcc catgacggcc agtgactgct tctttgccca ggccctctgc |
| 3361 | actaggccag cagccagtgg gagcagaggg gatgggaagg caggtggaca gactgtgaag |
| 3421 | tgctaaggca gagcggggaa gcagggctgt gagacagggt gggtgagctc cagggcctgg |
| 3481 | gttgctgtgg cctgccctgg ctgtgatcag ctgtcatttc ctctttgtgt atgacactgt |
| 3541 | ggaacatatt aaaatttctc tgggatggta tgtttggaat tcctctgatg ccccacctca |
| 3601 | ccaacttacc cggacaataa aagcaaggtt gtaagccttt gaacagctgg ctggctatat |
| 3661 | atttcccttc tttctttcgc ataatctaat tcagaaaaga atccagctag actggcagtg |
| 3721 | ccatgtctgg gtacttgttt cctgcaagtc cttcctcctc cacctcctcc cgccagtcct |
| 3781 | ggaatcttcc tgggtggcat gtggcttttc ttttcttttg ctcaccactg ctcccagccc |
| 3841 | gccccctttt cccttcgcct gagctccttc ctttgtcagc tggctctttg ctctgcctgt |
| 3901 | tttccagaca gcttgggtcc tgttccatcc ggggagaaca gcccatggga tctccccatc |
| 3961 | tccatagtat tcccaggatg tcattcttgg caccagctct gccgggctga taggactggg |
| 4021 | gggctttttg tagtcccgag cctgaatcca ctcacagaga ggagcagcca catggcttag |
| 4081 | ctgccctttg ggctgccgag agcggggctg gagtgaccgg gttggcagga acgagcatac |
| 4141 | catcacagtg acccgaacat ctccggcaaa ggccttgggg tgggagcgct atgggaatgc |
| 4201 | ctggatgcac ttcggcctac attaagagaa atgtggttat tctctgtttc gggggagaga |
| 4261 | caagcggctt gaaacaaagc cctctggatc cttggcccct tccctgcccc ctttcccggt |
| 4321 | ctgtccttcc cacatccctc cctccccaaa cagaaagaaa gagagacagg acttctaatt |
| 4381 | tggccagcac agacccgaat gtctttatga aacccattta gtgaaagaaa gaggggagaa |
| 4441 | atatattctg ggttgatccg aactaaaaaa tgcatggggc tttggagatg gggcgggatt |
| 4501 | ttttctttct ttctttctgt ctcttaagag cagaacaaca gtttcgttga tgagttgcaa |
| 4561 | atggaaggaa gtggacctct caattagaga ttcccattta agagcctcaa tgtaaacctc |
| 4621 | cctgtgacat ccttaaaaga tgctgctaat gtccctggga ccaaaaggta ttaaacagca |
| 4681 | agccaccagg cggcttccta ttccttttct ttttctgggg gctttggtcg tctttttcaa |
| 4741 | attagctaaa attcattaaa ggacccaaaa ggaaaaattt aaagcagctg aattaaaatg |
| 4801 | agtctttccc tgttagcctg acaagaagaa aaaaagaaag gaagaaaggg aaagaaagag |
| 4861 | aagaaagaac caattcccct ccactaccac ttcttgggtt ttaatatgaa ttattccata |
| 4921 | caagtcccta ggctagagga tctatttaaa gacgcctggc agcatgaagg gagagggtaa |
| 4981 | aaatacaacc actcttttgt ccatcaaagg ttttctttgg gaggacatta agagcattcc |
| 5041 | tgttttcttg tctgcccctg ccagtggcaa tgttccagct ggtagtatcc actcctcgcc |
| 5101 | catcaggtca gcaatcatga acttctgtgt ttaatttcag gagaaaacaa agggtgggaa |
| 5161 | atccttccga aacccctatg tgtgtgcagc agggcagggg aggctggaac tggaatcagt |
| 5221 | actctcttgg ctgtgcaggt tgcatgctgc aaattcacac acccacacag ttgagttgtt |
| 5281 | gaggaagatt gtgccgatgg cattatttct gatgccagct tcccttgcat ctgcaaagct |
| 5341 | tttttcttgt gtctctggca gtcatttgct tgtcaccatt catgtgcact gtccccttca |
| 5401 | tcagaggttc tcagagcctg atggtcaagg atatgtcact agagtcttac ccccagaccc |
| 5461 | attttcaaca gtaagaacgt gaaaccctgg atggggtttg caatctgaag caactacttt |
| 5521 | cttgttagga agagtgctga ctcagaaaat tcaaagaatg ggtaacttcc gttggcgaca |
| 5581 | tatccccagt gctcataatc aggaattcat ccagttgggg tccatttcac cctcatggca |
| 5641 | aaatctggac ataaacattg actagtagct ttaaactggg tataagattt gcaacagata |
| 5701 | acatttttgt cttttctttt ttcttttttt tttccacaaa agctaagaat ttttcagaca |
| 5761 | atttgctctc ttccaaggcc tggatcaatc ccaacttttt cttttaagcc atgatccaac |
| 5821 | caattgcagt atcctttaaa aatgaaaggg caacaggcta agacattcaa gaaagttgat |
| 5881 | aagcbgtcag aaaatgctca agggtggcct ttctacagtg ccacaaacca acaacagccc |
| 5941 | taaacgtgga gtcctcttcc atcctttcat cagtagggaa taaaaatagg gagagagcag |
| 6001 | gtcaggggag aagtaacaaa agagaagtaa gaaggattat ttttgatgtt caaaatctgc |
| 6061 | tgctgccctt tcaatatttt caaatatcac aatttcagaa agggaaggat ccctttattt |
| 6121 | cacccactct ccctcccagg aaggtgtttg aagttgctgt ctttacctga aaaggaggtc |
| 6181 | aactcctcaa gtgaaaaaac atcccctatc ttcaactcga agtaaaatgg aggtacacac |
| 6241 | atttgtacct aattatgtgg gtacaaatat aatttgtatc cacaaactat aaaggatgta |
| 6301 | aagaatcaaa gaaatccaat ccttaatcaa agtccaattt ttctttaaaa cttgagagga |
| 6361 | tattttaggg ctcattgcat tgctgtgatt tcactgcccc ccaccaaatt atgaaaaatt |
| 6421 | actccttttc agaatttaaa tttttctttt gagatgtgga atccaaaggc agcagaatag |
| 6481 | tattgttaca gggaagctgg cagtcaaaag acatagacat agctgcagca tgcatggttt |
| 6541 | aagcaaatca agacaagcag aaaaccacca ccccaacaag ttcagggtta tcagcaatat |
| 6601 | agggacacgt atttttatgt gatttttatg agaaccttgc ccctttgaca tatgtctgag |
| 6661 | tctaggagca ttccggattg caacgggatt gaattcagta ttcaaatccc accattgggc |
| 6721 | agaaaaggca aattgaatgg ggaatggaaa gactgagttg ctcctattgt ttatgcccca |
| 6781 | ttcctaacta agggctctac agctgttagg tgagatcact acccaccatt ccaaagtgtt |
| 6841 | gttgcjggtg aggaggttca aacgcagctt tggaaacact ttgctgcact ctttgaagaa |
| 6901 | aggccaacat gctcatttgg ctctagggta aaagagagcc tgtaccctga gctaacattg |
| 6961 | gtcacctctc ctcctgaggc cataccacag ccagcagtac agcagcagaa caagtgttta |
| 7021 | gttgtttcag cacaggtatc cccagaacac ctggcacctt ttcttttcca cagggagaat |
| 7081 | gtacattcat gcattttggc aagactgagt cctctgagtt gggtgtctcg gaactctcct |
| 7141 | attttccttc taaagggtct tatgtaaggt gagcagtaga gbitgtctca ttcctcataa |
| 7201 | aaaatcccct tcctgggagg gagtgggtga aatgaaggga tccttccctg actgaaattg |
| 7261 | tgctatttga aaaaattgaa agggcagtgg cagattttga acttcaaaat gaatccttcc |
| 7321 | tcctcctcct cctcttttgt tacttctccc atgacctgct ctctccctac tttaattccc |
| 7381 | cattgaagaa aggatagaag aggactctgt gtttagggct actgttgatt tgtggcacta |
| 7441 | tagaaaggcc acccctaagc attttctgac agctcatccc catctcagtc acagctttta |
| 7501 | tttgggtagc tggatttaca gaaataatca aatccctaga ggaaaagact tcaacagaaa |
| 7561 | agtacctcct gacacttggg taacctgact tggtcatttc caatttatgc aagatttgta |
| 7621 | ttctaaaagt caattagtta tgtcaactgt taaaaactca gaatgagtct ttccattctt |
| 7681 | cagaatgact cttttctgat tatctgtggg ccatagaagc ccacagatac tcagcacagg |
| 7741 | atccaagtgc cataccaagt ggtcaactct tttagacgta agtctcagcc cagggcttct |
| 7801 | ggaatgtacc tcccctagca gagaagctct gtagtagata ctttaccaag cacagggcct |
| 7861 | cgctcttgac cccaagacta ctgattctac ttgcagagaa gacaactttt ctaatcaatc |
| 7921 | tttctcttct atcctgaacc agagtatcag agattgtccc attagggcac gaggatctgt |
| 7981 | ggctcaagct cagttaagaa ataagcgtct ttcaaaagaa aggtgcaaga gggtggaact |
| 8041 | cagcctatat tgtcattatc aaatgcaaga agtctaatcc tagcatgatt tattaatatt |
| 8101 | agcctttctt ctctccccgt ttatgctttg gtgggtactg gacagaaacc ccacaaattt |
| 8161 | taagacagtt ttaagagaaa tagtaactgg ttaaatatcc tcactacttc aaattattat |
| 8221 | tattattatt gatattactg ttaacttttg tttttttgag acagggtctc actctgatgc |
| 8281 | ccaggctgga gtgcagtgat gcgatcacag cccactgtag gctcaaccac ccatgctcag |
| 8341 | gtgatcctcc cacctcaacc tcccaagtag ctgggatgac aagcgtgtac caccatgcct |
| 8401 | ggctagtatt tttttattat ttttgtagag atgaagtctc cctgbittac ccaggatgat |
| 8461 | cttgaactcc tgggcttaag tgatcctccc aacactgcct tctaaagtgc tgggtttaca |
| 8521 | ggcatgagcc gctgcacttg gcccacttcc tatgattaac aggatattat taatttagaa |
| 8581 | actatttagt acatggcaag cactcagtca aatggttatt aacggcbgtt tttatttcag |
| 8641 | gccaccaata tagcttcatc aaggggcaaa tacttatagc ttgggcttca gtgttggatc |
| 8701 | agacaccacc ttagaagttt tttgcaatca ttaactcctt aagtaagaag ggaactcttt |
| 8761 | ttgtaggatt gctttgggga atatgtagcc ccaaggcagg ggctgtactc tgagaagctt |
| 8821 | gggtagagtt ggagactgtt agaaatggat agacacataa aagcatttag accaatctgt |
| 8881 | tcattttgca gatgaggaaa ttgagtccta gaaaaggcaa gtgacttgtt caagatcaca |
| 8941 | cagccaatga tgggagggta ggactcaggg cttgaggatc agtttcagaa tgcagtgaaa |
| 9001 | ttgttatccc atatttcttt caaatcagta tagggacacg gaacactaac aacataggcg |
| 9061 | accaatgggt ctagggagga aaagatgaaa gctgtaggta agtgggagtt tggataacaa |
| 9121 | tgagatgttt ttctggagtt cctgacaatg cctgaaaaaa aaagtcagga ttttaagctt |
| 9181 | cagtcaggct caaggtcgag tcctcccact ccagtccctc ctcagacagt aaaacttttc |
| 9241 | aagccaagga catacatata ggtgggggca tttgacagtt ggctcatctc cccaccctcc |
| 9301 | aaattattta tatttctagt ccttcagttt agcactccta tttaccccag gattgtaatt |
| 9361 | cattgcctct ttccctggcc atattcctcc atcctttttg tttctcccat ctcttttctt |
| 9421 | cctccatcac ccccactgct gagcttggct acacttggct agtagtgcag gttgggagaa |
| 9481 | cacagagtcc tatcacagac tggaggacta ttatttaatc acaagaatgt tgtctttttt |
| 9541 | ctcctaaggt agcactctgg ggacggtcat tgctgtcttt attccctcac ccccccacca |
| 9601 | cccctgcact ggattagaca catgaaatgt gcctatctct gagatgaaag gagcaagaac |
| 9661 | tgcttcctcc ccactgacct tttgcctgcc catccttgga gatacctgga gttggcaggc |
| 9721 | tggaggccta gcagcatttg cagtcagtgc cgctgcctct gggtcagccc aggcttggct |
| 9781 | ccttggctgc tactgatgtg ctgccagcta ggaatattaa aaaccattca ttgaacgcac |
| 9841 | aggatgcttt ataaaatcca acatgcbgtt tacagtttat aaattaactg ccttgggaag |
| 9901 | aggcatttga cttattctcc aaggcatcta gttgactaga tccaattgga atcctttgag |
| 9961 | ttcctgggaa ggggctactt aacacttcac actttctaaa ttagacctag agtttcttgc |
| 10021 | ttttctgatc ctagtactgt atgaagtttt atctagggtt atctagcaag ctttcttcca |
| 10081 | cttataaatc tttgatgttt ttgcaatttc tttgatagag gctttatgtt ctactatctt |
| 10141 | cactttattt atgcttcata ccataatttt ttaaaaaatt acaataaata tcaagtaatt |
| 10201 | ctggctgata tactgactcc attccaaggt cattatattt tatttgctta acttggtctt |
| 10261 | cttagaaatg atgcaatgaa tactggatac aaattagatg ttcagagagt ttatcaatgt |
| 10321 | gtctaaaaac catccaggaa aacaacaggc caagactctg cctgcagagt cagtgagcta |
| 10381 | gaagagggat cgaggatagg aactatattt ttcccctgac cctatctctt atctgctaga |
| 10441 | gcaaaaggag acacacagta ggtgctcaat aaatacatgt taaaaaatat ttgttgaaag |
| 10501 | aagccacaga agggaatatc agtatacatt agtattgaaa acagcctagg gggaaatatg |
| 10561 | gatactgaag caccaccctc ctgtgcctgg caagcaaggc aagaataagg ccattcttgg |
| 10621 | cacataccac ttagcctgtt gctgagataa cttgcgtgaa accagcactt taccctctgc |
| 10681 | cagccagaag gtcagcccaa gagtgagctg atctgtgggc acaacaccat ctctcaccca |
| 10741 | ggaggcbjgg cccgctgtaa gctctgctat attatttccc tgaggatgac aggtggggaa |
| 10801 | atctgggcac cagttgttct tttccactgg tatcatttgg aaggtagctc caaagtcggg |
| 10861 | cacgccagcc tacgtgcctc tcctgccggc agaggctcca cattggagct attagaatgt |
| 10921 | gggctctgta cgtcjgccaa gtccatgtct cagagactgt atccagagca tagcgtggcc |
| 10981 | acagggctac tgagttcagc aagagagtca ttctcttgtt caatccatta ttgcctgggc |
| 11041 | caaggttcta agtcttcgta ggcagcattt gattttatga cacgtcttaa aaaattaagg |
| 11101 | caaactggaa ttaatttagt tttgagaaaa caacagaagc tgctacaagg cagagataat |
| 11161 | tctaggctgc cagaaagtgg tgatctcagt ggtgtacatt ttcttaattc ctgattttcc |
| 11221 | tctttgtgag gtcttcctcc cactcccata ctttgcacat tctcacctat gcacaccctg |
| 11281 | agcaacacaa tgttgacaac ttgacttagc attgctcttt tcttaagctt tgttttcatt |
| 11341 | tcttcttcaa tacaacagtg ttggttcatt caatttgaac actcaaggca aaaaaaaaaa |
| 11401 | aaaaaatccc aggttatgtt ttcagaatct tacctttttg tttttgtttt gagggttctg |
| 11461 | tgagttttgt ggcatattta cattgttgct tacattctta tttcagaatt taagataaaa |
| 11521 | actgggcaac aactctcacg ttttctgagt gtgttgaaat gaaaaatctg tttcttagaa |
| 11581 | ttaatggtaa agcaacattt cctgtcaatc tttcattctt taatattact tctgggttca |
| 11641 | gctcaccatc tctaaagaga aagccagatg atcaagttac attgtatgtg acattaacta |
| 11701 | tctctttatc tgtgtaaatg tcataatatc tgcttgcaaa gtgttttatt catttttagg |
| 11761 | aaaaaatttt aaactgtgct tgcaattcag gatggtgcta ctaggtggca gtaatgtaca |
| 11821 | agaactatgt ggtcgccctg gaagagtatt tgactaagag actagcatgc cttcccgtaa |
| 11881 | ttataagaaa taaaaatata atatttttaa aatactcaaa ctggcacaaa cagtaaacat |
| 11941 | ccattaactt agttaccata tttaagctga gcttttaaaa gagaaagcct tattttttaa |
| 12001 | tgaaatttta aataaagtat acattcacaa gctcaaaaat ctaaaaatac gaaaagatat |
| 12061 | atagtgaaaa gtctttctct catgcctgtc cctcaactac cacaggtaac taattttgtt |
| 12121 | agtttcttgg gtatcctttc agagctttgc tatacaaata tgtgttttta tctctctcca |
| 12181 | ttttaactca aatcaataca tagagtttct gcatccttcc atatatagtt ggttagtata |
| 12241 | ttgttgtgtg aacattttag aatataatta accagtcccc tattaatgga tatttcatgc |
| 12301 | tgtttccaat tttatgctat ttcagccatg tgctcatgtg atttcacatg taggataatt |
| 12361 | cacagaagtg gaattgctgg gtctaaatta tatacatttg catttttaaa aggtattgcc |
| 12421 | agattggcct ctacagagtt tggaccaatt tatactgaac tttctccaaa atggacttgt |
| 12481 | tttcccacag ccttgccaat agggtgcatg atcagacttc ggaatctttg taaatctgat |
| 12541 | tggttgaaca atgtatttca aagtacttta attttcattc tcttaaatga gacttttatt |
| 12601 | ctcttaaatt ctcttctatc tttaagggcc ctttatattt cctttttctg tggagaaagt |
| 12661 | ggaaatgcca ataaatacaa cgatgcatac acatgtatag ggttttgtta ttgatgtagc |
| 12721 | ttgtttttgc catcatgctg tacatgatgt tctttaattt gctttgctca tttaaccata |
| 12781 | cctcctggcc atggctctga agagaagttg ctggcagtgc agaagaaggg ccaggactgg |
| 12841 | aatgtctgct tctctcttca tccttttgcc attgactcct gggggaaata tctgtagacc |
| 12901 | gaagcagtga aatctaatca attctctttc tgacactaat taaggcttca aagagacaga |
| 12961 | taaccacttg ggataattta gtcacagtga aacttgggaa atggtcagta atatttcatc |
| 13021 | ctctgaaagt ggaccccaag aaagttctgg ctctttgagt tgttgtcttg gtaattttca |
| 13081 | gggtaacgtg tataggaaaa cccagattat gcagatgaaa agaaaacaaa catgctcttc |
| 13141 | tgcatccttt gcagatttga aactttgggc acaggtttga tttatttcaa tgagatgttg |
| 13201 | ctattagcat gaacataaag tggtgcaaag ttgtgctgga atatggtctc gtcaactttg |
| 13261 | ggctcactgt ctgcatatgg agatgatagt aactgaatcc atagttatca agtggtggca |
| 13321 | ttttagaaca caaagggaca gcagatgcca tctctgtcaa ctccttccct ctacagatga |
| 13381 | ggaaacttgg gctagaggag gttgaatgac ttgtgtaagg cttccccagc taattaatgg |
| 13441 | cagtgccagg actcaagtcc aggtgggttc cctcattact ggtccttgcc cttcctgcaa |
| 13501 | tttataggac ttccctgagg cacatgtgct gaggctttgc tattgccagg gattctgtgc |
| 13561 | tctgaaacag ccctatctca cacacccctt tccacttagg atcccctacc tcacacttcc |
| 13621 | aagacagcta attgaggcta aatgggtctg atgccattct attagtgcaa aataaattgg |
| 13681 | cttatgccaa cttgaactcc taatcttgat tttatcaaca ctttgccctg tttattcaga |
| 13741 | ctgttcatga gtaggaagtt aaggaaaatg ttgcctatga acaaaatgat caaactttta |
| 13801 | tctgaaatac ctttgaaagt tttcccgaag ctttaattat catgttcctt ttgttttgga |
| 13861 | tgtaatagca ggccctccca attttcctaa atgtttgaaa atatttttga tactttctgt |
| 13921 | cttctgttgt ggttaaaaaa aagaaggcac cagtgttggc tatgcctggg gagttagtga |
| 13981 | ggtaatctgg agagatctct ggaccccagt cctttgtcca agaggtatgg tcaaaagaac |
| 14041 | aaagcaaatt tcagaaaaac cggtataata tgatcctatt ttaatggtaa gtctgttcca |
| 14101 | acaactgctt tctttttcga attacaccat gtgcccaggc tacaaaggct ctgcagaaat |
| 14161 | gtgactctgt tggcaaatac gcgtgtgata ccttaaccat gctggaggcc agttagcata |
| 14221 | atgbitattt cagatgcagt ttgtcatcag tgcbgggtgc tatggggctt aaaacaaaaa |
| 14281 | caggatgagc ctagagcaca gaagtggaaa attaggtggg tgggtgagta tggacttgga |
| 14341 | aatggaaaat gtgcttccct gtgggacatg gcttgtgttc attagtgctg acctgcctcc |
| 14401 | tctctagccc tgtaagctga cgctgacacc aaagcttgct gagaaactga atagaccctc |
| 14461 | ccgccccgac caaccaagga caaagatgag accacccaat tcggttacgt tgttgccaga |
| 14521 | acaacatgtt taatctttaa catgggttca aactattctt ggccctagga acatggactt |
| 14581 | cagcaattaa agtcaacatg tgcttccatt aaaccattgt gtccacctcc aaatggttat |
| 14641 | aaatatgtag cataagctat gggagttggg gtggaatgga tgacagcctt tgctaatgac |
| 14701 | gctctagaaa ccaatattct cctctcaaaa taacatggaa aaattctact taatacctcc |
| 14761 | tgggttccat tagtggttct gggtaaataa ttctggggaa agtaatttct gttttcattc |
| 14821 | cagctgtgca gcagatactg tgatgatgga ttgcaagtgc aaagagtaag acaaaactcc |
| 14881 | agcacataaa ggacaatgac aaccagaaag cttcagcccg atcctgccct ttccttgaac |
| 14941 | gggactggat cctaggaggt gaagccattt ccaatttttt gtcctctgcc tccctctgct |
| 15001 | gttcttctag agaagttttt ccttacaaca atgagaaaac atgtactagc tgcatccttt |
| 15061 | tctatgctct ccctgcbggt gataatggga gatacagaca gtaaaacgga cagctcattc |
| 15121 | ataatggact cggaccctcg acgctgcatg aggcaccact atgtggattc tatcagtcac |
| 15181 | ccattgtaca agtgtagctc aaaggtaaga ccaaggtctc tgtgaggaga gcatttccct |
| 15241 | cagaaacagg caagaagcca tatttctttg tcaggggatg gagaactaag atcatagccc |
| 15301 | aaacttaagt gatgtggctg gcccacaggg cttgtgggag aatgaggctt ttagaatttc |
| 15361 | cccccgtgct ttgcactgtt atcagtaaaa gtgcctaatc aatcatgtgc acacccatcc |
| 15421 | agtgggacag gtgtcctttg tccctggctg tgatgtttat gagtggtagt gtgcttttcc |
| 15481 | aaaaaagaaa aatggagttt acaagtcatc ataactctct agctccatca tcaataaaga |
| 15541 | ggaagagaat gcaaagaatg cgattgagca gtggaacata cttcttggag ggctctttaa |
| 15601 | agagattctt ggtgaaataa ctggctttgt ggtctgagcc tttcttcagg tgctacattt |
| 15661 | ctgttcaaat gatttcaaaa gataagatgg caatatgatc atttatcatt tttacattgc |
| 15721 | ttatccaaat cgttctcatt tggaaaagga tgcabitttc ttgcagaggc agtccgtgcc |
| 15781 | tcagtggtgt gcaagggaat atcatgctta aaaggccacc aagagtggcc agctacatgg |
| 15841 | accacccaga agggaggcac attgtagggt ggaacatacg agatctcacg actgtcactg |
| 15901 | cccctaaaca ggcacaatga atgaaatttg tccacacttg gtaaataata atttgtttag |
| 15961 | cccaacctca gagattttta catttagttt tgagatgaaa atcacttaaa cattctcgta |
| 16021 | tggcaagtaa tttttgaaat taccagtata attaagaatt ttttatagta tcaatcacca |
| 16081 | gaattaagac catataagcc aatccctcca ctctccattc aaaaacatta tgacttttgt |
| 16141 | atgccttgaa aatttccatt aatttctctg attatagctc agtgatgatg attcatttta |
| 16201 | gtttaggagg atcagaattc gagttaaatc attttaacca ttatattaat aagatctatg |
| 16261 | actgbjggaa aaaatagaga ttttccactt aataaaaact ttctggctct tatttgtgct |
| 16321 | tgtagaacca aaaaaaaatg gagtaaatag atgaacataa atttttgcag ggccacaatt |
| 16381 | ccttcttagg aaagggaaac taaaacaaat tgagaaaaaa catgagaagt gcttttacaa |
| 16441 | gtgtgattgc tcagaaattg tgggcccatg taaggttgac tgcagcaatt attagtttct |
| 16501 | ccttccctcc cccttcagaa acagacagca tgaatattta gtgattttat tccatggata |
| 16561 | atttctttcc gtattgagtt gtcctccata atcgtgattc ttttttaaaa aaaggaatta |
| 16621 | aaattatttc aaagaaagtg tcactatgat gatagaaagg aacaaagaaa taggagcatc |
| 16681 | tataaaaact agaaaacaat ctggaaagac tggacaaaat gatggaggag tactttggca |
| 16741 | acaatcacat taatctagcg aaggtcaaag aagagacatc atgaactcaa accgaagaaa |
| 16801 | ttcacatgtg aattctgagc atgagtctta gaaacagact ttagtgtact gttattcacc |
| 16861 | tttgtttctt ccagaaagcc atggcaaata acagcgcaaa attgtgatag caggagaaat |
| 16921 | gtttgtaatt tcatgggaac aatctgtttt caaacatccc aaactatccc aaatatagca |
| 16981 | atagttttat gtaaatggtg cttgcaatta taaacctttc ttccctggcc ataaaatatg |
| 17041 | cctggcaaaa tctcaactac ccagaccttt tctaggttag atttttctct atgtatccag |
| 17101 | gagcaaaact gttttcattt ggaaatgttc tataattctt aactcttaca ttctcgggct |
| 17161 | gatcttttct ctaatgggtc tcacttaatg aaattgtttg cctttagaga cttggataaa |
| 17221 | acatttagcc tatgtctaga aaagaggcaa caacaatcta ccctagcttc tttttacaaa |
| 17281 | gaaaagactg ggatagattt ttttgtctct ataaaaatta tcccttgaca tcatgttcaa |
| 17341 | gggtcattat ttattaaaca tgtgcctact gtttgcctgc caattgttaa tgctttctga |
| 17401 | ctcacattta tccattatct ggccttgtaa aggcaagaaa gggagaatgt gacccaggct |
| 17461 | cagggaaggg agtgtacctg cttgaacacc taatatatgt gtcaggcacc tcatattgta |
| 17521 | tattataatc attgccaaga aacctgtgat ggcaggcatt attattccca ttatcctggt |
| 17581 | aaggaaaact gaagcccaaa ataattagat tgcttgatat catatagcca gggagtggca |
| 17641 | atgtctgcct tacagcattc atcttcccac tacttggatc ttcatattgg aggaacacaa |
| 17701 | gtagaatgta ggagccatca catagaagtt caggctctgc ttctgatctg ctggcagtaa |
| 17761 | taatttatac tcagcaatgt ttctagaaaa aataaataat agtgaaagcc tttctgggag |
| 17821 | ctttcaatga gactgttcat cccagccctg aacttgcagc tggccagtcc taggtccctg |
| 17881 | ctgcccatct cctagcaatt ccggaaagga ctgagaggga gtcaggcaga aaagactggc |
| 17941 | cacagtggcc caccaaagag gacagtgtgg ccacagatta ggatgtgcct gatagtttta |
| 18001 | agtggtggca cctcctgggt ttgggtacaa aagatcctgg gagtagcagg ttcatttata |
| 18061 | atcttcatgg aagactaagt ttctctaaaa tttggagtaa aggctgtaga gcaaacaggc |
| 18121 | aaaagaccag ttgatagtgg aaacagactg cctggtggaa tctctatgag aactgaggca |
| 18181 | tgccaggctt tgaagtgaga gagacctggt ttccaattcc agctccatgg cttgccgaat |
| 18241 | gagtgacttt gaggaagttc agtaacttcc ttctttgtgc ctcagtttct tcccatgcaa |
| 18301 | aatagagctg tctacctgag ggtatgggta tgggtgttgg tgatttgtaa agcatccagc |
| 18361 | ggtgtccagc acataatagc catttaatag aagatattat gatcttgatg ataaagttat |
| 18421 | aaactaagca ggtgtttaga ctcaattttc tatttcagtc acaactgaga tctcaataac |
| 18481 | tgctgggatc tcctatagcc ttaaaagatt aggaaaatga accttattgt agttcttgtt |
| 18541 | aagcacaggg tggggcagaa gagcaaagta aatgtaagcc actgtgctgg gtgctaacag |
| 18601 | ggaggataaa agtaaaagag aaacagcccc gatatctgtc taaccttcct tcccagatga |
| 18661 | gtggaggaag gaggggctgg agggggatga gttttggact tgggccaggg aggggatttc |
| 18721 | aggaatggag ggtgggaaag caaactggca gggaagacct ggaaagtctc agttgggtga |
| 18781 | ggagtggggg atgctggccc caggccaggg catggaacca gggcatgact atctgaaccg |
| 18841 | gtaagggcca caggagcagg tggggaactg gaagagcaac aacaaaggat aaggaggaag |
| 18901 | aggtttggga gacaaaacct aggaaaagag gacctggtat gctaagggct gagtcctaac |
| 18961 | agcttcctaa caggaccccc aagccatctt ctactgctac ccaccaagct catggtgtga |
| 19021 | taggagaaat ggagggagtc aggaaaattg tgtttataat acaatagact tcttgagaga |
| 19081 | tataatttga tttttttaaa aggaacaaat ttatactgag tgcctaccat gtccaggtgc |
| 19141 | tgtggaaggt gctggagact ctaaagtgga aagaaagaaa aaagagacaa tttttttgcc |
| 19201 | ttcatgatgc ttacaagaaa atggggagag agggaggagg ggtgttctgt gcacaaagat |
| 19261 | cagtttgtat ctgtttgatt catgaccgga gtgaagggac cagtttctag ttggagtgag |
| 19321 | ctgagttccc atccaccctt tcaaagcccc caccatctct ctgctgcttt gttccctggt |
| 19381 | tgcaattttc ttggtgccct cagcctagca cagatctttt ggaggttgac ctgggtccct |
| 19441 | gaagatgagc ggagttatga ggctgcccgt ggggaaagaa tgggagaaga agcatgggtg |
| 19501 | aatcttgttc ctgaggttat agagggtgtt tcaagaggtg ccatggaaat aagggtgcat |
| 19561 | agtgttcact gctgcgaaaa aggcaaaata cttttccact cbitcggagt aaaatcgcaa |
| 19621 | aaatgctctt ctagggtggg acaggtgggt ctttattctg atgctaatgg tgacatctgg |
| 19681 | tcagtcaagg ctcttggaag attcagctct gcataagctt ggggatggtg aagctaatgt |
| 19741 | cccaagaagc ccacaagaaa aagttagact tgtatgtcta tggatatggt caggggtttc |
| 19801 | tgaggcaaat caatgtagat aaggaagtct gtgagttggc atatgcttga ggaaaacatg |
| 19861 | gtatcaggag gcaggtatta tactggttta ggtcagggct ttggtttcag atagaccttg |
| 19921 | gtttgattcc agctctgcat tttaccacct atgtgagttt gggcaagtta ctggaactct |
| 19981 | ctaaagcttg agtttcctta tctgtcctaa tagtgtagat cataacagta ctttcttgta |
| 20041 | gggttgttgt aaggatgaaa taactcacat tgcaagtgct caataaatgt tcttattagc |
| 20101 | gaaatgatgg ttatctagtg attcatctag agcacagccc tcaaacttga atgggtccag |
| 20161 | agacctgcta ctcaaagtgt gggcaccagc ccagtaggac tgacatcaac tggaatctga |
| 20221 | tgggaaatgc agaatctcag gctctaggcc agaactactc aatcagaact tgccttttaa |
| 20281 | caagatccta gatgattcac acgcacattc cagtctgaga agctctgatc cggaagagat |
| 20341 | caggagatgt tcaagtgctg aaacacaagt aaggcatggc agaagctaaa atgtgaagta |
| 20401 | ttgagagtaa accaggagag cagatggtta ttccttccat cccttaagga tcttatcttt |
| 20461 | caaacttctg ctttaccact tcaacacaca aaacagagat agatttcctt ctaggagtgt |
| 20521 | gtgtgtgtgt gtgtgtgtgt gtgtgtgttg agaacatcaa tggttcaata attgcttcat |
| 20581 | agtcttttct tccaggaaag agcatttgaa tttggctaca gagaatagat aggtgggatt |
| 20641 | ttattaggca gagcaaggtg gaaaggacat atttgggaga cagaagacat aagcaaaggc |
| 20701 | aagaggcagg agaattcagg gcactttctt ggactcctaa gtagttaagt ttgactggag |
| 20761 | tagggagtgg gtagtagagt gatgagaata gttgtaagta agactggaaa tacatgtgaa |
| 20821 | acctgggtca tgaagggcct tgactcctct tcaagatttt ggattttatt ctgaactact |
| 20881 | gaaggcattt attgtacatg tctgtgcatt cttcttgcac aaacagtcca gctcccaagg |
| 20941 | aagaggggcc cagcccattg gaggtggccc cacgtccttc agtgcctgga gttcttgtcc |
| 21001 | ttcagagtgg gcbgggggtg gagctggaca tcctgaaaac ttttagtgag attgcaatca |
| 21061 | gatgagctca tttacaaatg gccctacgct gttgacttgg tcattttatg gacagtgcta |
| 21121 | atggcccagt cagttaggcc tacgtttggt tcacctgtgt atacatcact tggatattat |
| 21181 | gtcccatatc attgttggcc cttctgagtt aagttcgttg gcacagattt actttgtcca |
| 21241 | cccagactga aactgcacct ctgaagactc catcacggaa ggtgactctg tgaataactg |
| 21301 | cttagtcaac ctaatagatg atctagatga gagattagca aatttaacac tactccaagg |
| 21361 | tgaggtatca agcagctctt cccacataca gggagatggg gggagaacag actaaggaag |
| 21421 | atcttggact ctctctctca ttagagaaat gggggtggga attagggact agcctgtgta |
| 21481 | ctactgacct atggcatagt ctctcaaaac ccatttcaga gccaggcaca gtggtacatg |
| 21541 | cctgtagtcc tggctacaca ggaggctgag gcaggaggat cccttgagct caggagttta |
| 21601 | aggctgtagt gtgctatgat catgcctgtg aataaccact gcactgcagc ctggacaaca |
| 21661 | tagcaagact ctgtctctaa aaacaaaaca aaacaaacaa acaatcattt ctgatagttt |
| 21721 | actttgcctg tcaaaatgaa gagcaggtag gatagaatca aaagctttaa aaaaatcaaa |
| 21781 | acagcttaca gctgctattt tctctctgcc tctgcgatca ttcagagaaa ataaattcac |
| 21841 | tggtctagtc caacttattc ttccctaagc cctgctgttt tttttttcta gtatttcata |
| 21901 | ttgccttggt ggttgctaag tgattgttgg atttagcccc agtatattct cagataacta |
| 21961 | tgccaataat ctataattac cagaattcat cttttctccc ttttggaaag atggactggc |
| 22021 | tatttttttc ttgtaaacct tgggtgttta attctgccct acaggatgat gtcagagata |
| 22081 | atagctggtg agtctttaat aataactgcg aattcctaca atattgtaag gtaaacgtca |
| 22141 | aaaggtttca tgcatatata tgtatctttt aatctttcat ttgaacagtt tcacttttta |
| 22201 | tgatcttgct gttggttctg gaattatagg acaaattttt cttttctttt cttttctttt |
| 22261 | tgagacaggg ccttgctctg tcactcatgc tggagtacag tggcttgatc atagcttcct |
| 22321 | gcagcctcta attcctgggt tcaagtgatc ctcctgcctc agctgccaaa gtagctggga |
| 22381 | ctacaggtgc acatcaccac gcctggttaa ctttttattt ttttttttag agacacggtc |
| 22441 | atgctatgtt gcccaggctg gtctcaaact cctggggtca agtgatcctc ctgcctcaga |
| 22501 | ctccaaagtg ttgggattat aggcatgaga caatacacct ggcccagggg atttttttct |
| 22561 | ccatcactta acatgaaatt caccaagcaa aacctcttac ataaccatgg gaccaataat |
| 22621 | ctcagattct ccattcccct ccccaccttg atattaggat tatgcagctt aatgagtcaa |
| 22681 | gctgtcccac cctacccacc tattactccc actcccagga taccaggagt tttgtatggg |
| 22741 | atacataaat gatccttttt tccattccgt taagctgtat gcaaattgtg tgtgtgctta |
| 22801 | tgtacatttt tctggggata actttggtag ttttcatcag attcttaaag gtgtctgttt |
| 22861 | gctaaagcca gattaagagc tactataaag aacacatagc ctccgttatt ccagcccaat |
| 22921 | ctttggaaat agagattatc agaatgggta catcctaata tttgccgcaa atgactctga |
| 22981 | agatgcggat gcaattacat aaatcccagg ctccttcaac atataaaccc agaagtgtga |
| 23041 | tttcagggcc ccagacatgc cctgtctcta cttcattctc ttgtcccaaa ttgcagcacc |
| 23101 | cagaatattt cttcctaagc attactcagg ctatcctatt ttcttattca gaaactatat |
| 23161 | tcctgttctt tagctatttc ctgcacaaat caatttcttt tttttttttt tttttttggt |
| 23221 | agtcatttta atttacttct tggtttcaat ttggattgac tttctgcatt ttgctactgg |
| 23281 | tagaattgca atgcattggg ccagtggtag accactacct gtcaggagaa atttcttttg |
| 23341 | ttctttggtt tttactcgca catcacagtg atgggcgtca ttcagtggtt ctaaaccctc |
| 23401 | agtacactta gaaatcacct aagaagcttt gaaaaccatg aaagcctggt ccctatctcc |
| 23461 | aaggatttta attcaatcga tctgaatgag gcctgggtgt tgacttaaaa aaaatgcaac |
| 23521 | atgcattgag ccactggtct aatctagcag gaattggcaa cgagtgtgag ggtctttcaa |
| 23581 | aagatgctgt tttacctggc taaggttgtg gcatgcccac agagtaacca cctccttttc |
| 23641 | tttccccaga tggtgctcct ggccaggtgc gaggggcact gcagccaggc gtcacgctcc |
| 23701 | gagcctttgg tgtcgttcag cactgtcctc aagcaaccct tccgttcctc ctgtcactgc |
| 23761 | tgccggcccc agacttccaa gctgaaggca ctgcggctgc gatgctcagg gggcatgcga |
| 23821 | ctcactgcca cctaccggta catcctctcc tgtcactgcg aggaatgcaa ttcctgaggc |
| 23881 | ccgctgctgt gtgtggcttc tggatgggac aactgtagag gcagttcgac cagccaggga |
| 23941 | aagactggca agaaaagagt taaggcaaaa aaggatgcaa caattctccc gggactctgc |
| 24001 | atattctagt aataaagact ctacatgctt gttgacagag agagatactc tgggaacttc |
| 24061 | tttgcagttc ccatctcctt tctctggtac aatttctttt ggttcatttt cagattcagg |
| 24121 | cattttcccc cttggctctc aatgctgttt gggtttccaa caattcagca ttagtgggaa |
| 24181 | aaagtgggcc ctcatacaca agcgtgtcag gctgtcagtg tttggtgcac gctggggaag |
| 24241 | aatttacttt ggaaagtaga aaagcccagc ttttcctggg acatcttctg ttattgttga |
| 24301 | tgtttttttt taccttgtca ttttggtcta aggttgccat tgctgctaaa ggttaccgat |
| 24361 | ttcaaagtcc agataccaag catgtggata tgtttagcta cgtttactca cagccagcga |
| 24421 | actgacatta aaataactaa caaacagatt cttttatgtg atgctggaac tcttgacagc |
| 24481 | tataattatt attcagaaat gactttttga aagtaaaagc agcataaaga atttgtcaca |
| 24541 | ggaaggctgt ctcagataaa ttatggtaaa attttgtaag ggagcagact tttaaagact |
| 24601 | tgcacaaata cggatcctgc actgactctg gaaaaggcat atatgtacta gtggcatgga |
| 24661 | gaatgcacca tactcatgca tgcaaattag acaaccaagt atgaatctat ttgtgggtgt |
| 24721 | gctatagctt tagccgtgtc acgggcatca ttctctaata tccacttgtc catgtgaaac |
| 24781 | atgttgccaa aatggtggcc tggcttgtct tctgaacgtt tggttcaaat gtgttttggt |
| 24841 | cctggaggct caaattttga gttattccca cgttttgaaa taaaaagagt atattcaaaa |

Mouse Mature NDP Protein (NCBI Accession No. NP_035013.1)
(SEQ ID NO: 23)
KTDSSFLMDSQRCMRHHYVDSISHPLYKCSSKMVLLARCEGHCSQASRSEPLVSFSTVLKQPERSSCHCCR
PQTSKLKALRLRCSGGMRLTATYRYILSCHCEECSS
Mouse Mature NDP cDNA
(SEQ ID NO: 24)
aaaacagacagttcatttctgatggactctcaacgctgcatgagacaccattatgtcgattctatcagtca
cccactgtacaaatgtagctcaaagatggtgctcctggccagatgtgaggggcactgcagccaggcatcac
gctctgagcccttggtgtccttcagcactgtcctcaagcaacctttccgttcctcctgtcactgctgccga
ccccagacttccaagctgaaggctctgcgtctgcgctgctcagggggcatgcgacttactgccacttaccg
gtacatcctctcctgtcactgtgaggaatgcagctcc
Rhesus Monkey Mature NDP Protein (NCBI Accession No. NP_001253901.1)
(SEQ ID NO: 25)
MRKHVLAASFSMLSLLVIMGDTDSKTDSSFIMDSDPRRCMRHHYVDSISHPLYKCSSKMVLLARCEGHCSQ
ASRSEPLVSFSTVLKQPFRSSCHCCRPQTSKLKALRLRCSGGMRLTATYRYILSCHCEECNS
Rat Mature NDP Protein (NCBI Accession No. NP_001102284.1)
(SEQ ID NO: 26)
KTDSSFLMDSQRCMRHHYVDSISHPLYKCSSKMVLLARCEGHCSQASRSEPLVSFSTVLKQPFRSSCHCCR
PQTSKLKALRLRCSGGMRLTATYRYILSCHCEECSS
Chimpanzee NDP Protein (NCBI Accession No. XP_016799622.1)
(SEQ ID NO: 27)
KTDSSFVMDSDPRRCMRHHYVDSISHPLYKCSSKMVLLARCEGHCSQASRSEPLVSFSTVLKQPFRSSCHC
CRPQTSKLKALRLRCSGGMRLTATYRYILSCHCEECNS

### Trio Rho Guanine Nucleotide Exchange Factor (TRIO) and F-Actin Binding Protein (TRIOBP)

[0137] The TRIOBP gene encodes “trio Rho guanine nucleotide exchange factor (TRIO) and F-actin binding protein” (TRIOBP), a protein that is expressed along the length of the stereocilia actin filaments and in the stereocilia rootlets of the inner hair cell. TRIOBP is important for the stability and rigidity of the stereocilia of specialized hair cells in the inner ear (see, e.g., Kitajiri et al. (2010) Cell 141: 786-798; and Zhao et al. (2015) Curr. Opin. Neurobiol. 34: 172-179).

[0138] Stereocilia, which are about 10-50 μm in length, are important for hearing and balance. Stereocilia play a mechanosensing role in hearing. By bending in response to sound, they form a structure for mechanoreception of sound stimulation.

[0139] The human TRIOBP gene is located on chromosome 22q13.1. It contains 24 exons encompassing ˜80 kilobases (kb) (Hirosawa et al. (2001) DNA Res 8:1-9; NCBI Accession No. NG_012857.1). To date, there are three known families of TRIOBP splice isoforms: TRIOBP-5, TRIOBP-4 and TRIOBP-1 (see, e.g., Kitajiri et al. (2010) Cell 141: 786-798). While TRIOBP-1 is ubiquitously expressed, TRIOBP-5 and TRIOBP-4 are expressed predominantly in the inner ear and in the eye. TRIOBP-5 gene (NCBI Accession No. NM_001039141), the longest isoform, contains 24 exons, and the translation start site for the TRIOBP-5 isoform is found in exon 3. The TRIOBP-5 protein has a molecular mass of ˜218 kDa. The TRIOBP-4 is gene encoded by exons 1-6 and is expressed from the same promoter as TRIOBP-5. The TRIOBP-4 protein has a molecular mass of ˜107 kDa. TRIOBP-1 (NCB1 Accession No. NM-007032) is encoded by exons 11a-24, has a molecular mass of ˜72 kDa, and is translated from a start site in exon 11a (see, e.g., Siepel et al. (2001) J. Cell. Sci. 114: 389-399).

[0140] Various mutations in the TRIOBP genes have been associated with non-syndromic hearing loss (e.g., profound, prelingual deadness DFNB28 (MIM #609761) (see, e.g., Riazuddin et al. (2006) Am J Hum Genet 78: 137-143) and age-related hearing impairment (see, e.g., Hoffmann et al. (2016) PLoS Genet 12(10): e1006371)). DFNB28-causing mutations have been predominantly found in exon 6 of TRIOBP, an exon that is present in both TRIOBP-4 mRNA and TRIOBP-5 mRNA. DFNB28-deafness can be modeled by generating TRIOBP-4/5 deficient mice, in which mouse exon 8, the ortholog of exon 6 of human TRIOBP-4 and TRIOBP-5, is mutated/deleted (see, e.g., Kitajiri et al. (2010) Cell 141: 786-798). Nonsense mutation (c.5014G>T (p.Gly1672*) in exon 9 of TRIOBP-5) and frameshift mutations (c.2653del (p.Arg885Alafs*120), c.3460 3461del (p.Leu1154Alafs*29), and c.3232dup (p.Arg1078Profs*6) in exon 6)) were found in Dutch families with congenital and moderate hearing impairment (see, e.g., Wesdorp et al. (2017) Hearing Research 347: 56-62). The nonsense mutation found in exon 9 was the first disease-associated mutation that was present only in TRIOBP-5.

[0141] Additional exemplary mutations in a TRIOBP gene that have been detected in subjects having hearing loss and methods of sequencing a nucleic acid encoding TRIOBP are described in, e.g., Shahin et al. (2006) Am J Hum Genet 78:144-152; Diaz-Horta et al. (2012) PLoS One 7: e50628; Gu et al. (2005) Clin. Genet. 87: 588-593; and Table 1 in Wesdorp et al. (2017) Hearing Research 347: 56-62. Methods of detecting mutations in a gene are well-known in the art. Non-limiting examples of such techniques include: real-time polymerase chain reaction (RT-PCR), PCR, sequencing, Southern blotting, and Northern blotting.

[0142] An exemplary human wildtype TRIOBP protein is or includes the sequence of SEQ ID NO: 28, SEQ ID NO: 30, or SEQ ID NO: 31, SEQ ID NO: 32. Non-limiting examples of nucleotide sequences encoding a wildtype TRIOBP protein are or include SEQ ID NO: 29, and SEQ ID NO: 33.

[0143] In some embodiments of any of the compositions described herein, the TRIOBP protein comprises a sequence that is at least 75% (e.g., at least 80%, at least 85%, at least 90%, at least 91%, at least 92%, at least 93%, at least 94%, at least 95%, at least 96%, at least 97%, at least 98%, at least 99%) identical to SEQ ID NO: 28.

[0144] In some embodiments of any of the compositions described herein, the TRIOBP protein comprises a sequence that is at least 75% (e.g., at least 80%, at least 85%, at least 90%, at least 91%, at least 92%, at least 93%, at least 94%, at least 95%, at least 96%, at least 97%, at least 98%, at least 99%) identical to SEQ ID NO: 30.

[0145] In some embodiments of any of the compositions described herein, the TRIOBP protein comprises a sequence that is at least 75% (e.g., at least 80%, at least 85%, at least 90%, at least 91%, at least 92%, at least 93%, at least 94%, at least 95%, at least 96%, at least 97%, at least 98%, at least 99%) identical to SEQ ID NO: 31.

[0146] In some embodiments of any of the compositions described herein, the TRIOBP protein comprises a sequence that is at least 75% (e.g., at least 80%, at least 85%, at least 90%, at least 91%, at least 92%, at least 93%, at least 94%, at least 95%, at least 96%, at least 97%, at least 98%, at least 99%) identical to SEQ ID NO: 32.

Human Full-length Wildtype TRIOBP Protein Isoform 5
(SEQ ID NO: 28)
MEEVPGDALCEHFEANILTQNRCQNCFHPEEAHGARYQELRSPSGAEVPYCDLPRCPPAPEDPLSASTSGC
QSVVDPGLRPGPKRGPSPSAGLPEEGPTAAPRSRSRELEAVPYLEGLTTSLCGSCNEDPGSDPTSSPDSAT
PDDTSNSSSVDWDTVERQEEEAPSWDELAVMIPRRPREGPRADSSQRAPSLLTRSPVGGDAAGQKKEDTGG
GGRSAGQHWARLRGESGLSLERHRSTLTQASSMTPHSGPRSTTSQASPAQRDTAQAASTREIPRASSPHRI
TQRDTSRASSTQQEISRASSTQQETSRASSTQEDTPRASSTQEDTPRASSTQWNTPRASSPSRSTQLDNPR
TSSTQQDNPQTSFPTCTPQRENPRTPCVQQDDPRASSPNRTTQRENSRTSCAQRDNPKASRTSSPNRATRD
NPRTSCAQRDNPRASSPSRATRDNPTTSCAQRDNPRASRTSSPNRATRDNPRTSCAQRDNPRASSPSRATR
DNPTTSCAQRDNPRASRTSSPNRATRDNPRTSCAQRDNPRASSPNRAARDNPTTSCAQRDNPRASRTSSPN
RATRDNPRTSCAQRDNPRASSPNRATRDNPTTSCAQRDNPRASRTSSPNRATRDNPRTSCAQRDNPRASSP
NRTTQQDSPRTSCARRDDPRASSPNRTIQQENPRTSCALRDNPRASSPSRTIQQENPRTSCAQADDPRASS
PNRTTQQENPRTSCARRDNPRASSRNRTIQRDNPRTSCAQRDNPRASSPNRTIQQENLRTSCTRQDNPRTS
SPNRATRDNPRTSCAQRDNLRASSPIRATQQDNPRTCIQQNIPRSSSTQQDNPKTSCTKRDNLRPTCTQAD
RTQSFSFQRDNPGTSSSQCCTQKENLRPSSPHRSTQWNNPRNSSPHRTNKDIPWASFPLAPTQSDGPRTSS
PSRSKQSEVPWASIALRPTQGDRPQTSSPSRPAQHDPPQSSFGPTQYNLPSRATSSSHNPGHQSTSRTSSP
VYPAAYGAPLTSPEPSQPPCAVCIGHRDAPRASSPPRYLQHDPFPFFPEPRAPESEPPHHEPPYIPPAVCI
GHRDAPRASSPPRHTQFDPFPFLPDTSDAEHQCQSPQHEPLQLPAPVCIGYRDAPRASSPPRQAPEPSLLF
QDLPRASTESLVPSMDSLHECPHIPTPVCIGHRDAPSFSSPPRQAPEPSLFFQDPPGTSMESLAPSTDSLH
GSPVLIPQVCIGHRDAPRASSPPRHPPSDLAFLAPSPSPGSSGGSRGSAPPGETRHNLEREEYTVLADLPP
PRRLAQRQPGPQAQCSSGGRTHSPGRAEVERLFGQERRKSEAAGAFQAQDEGRSQQPSQGQSQLLARQSSP
APSRQVTMLPAKQAELTRRSQAEPPHPWSPEKRPEGDRQLQGSPLPPRTSARTPERELRTQAPLESGQAGP
RQPLGVWQSQEEPPGSQGPHRHLERSWSSQEGGLGPGGWWGCGEPSLGAAKAPEGAWGGTSREYKESWGQP
EAWEEKPTHELPRELGKRSPLTSPPENWGGPAESSQSWHSGTPTAVGWGAEGACPYPRGSERRPELDWRDL
LGLLRAPGEGVWARVPSLDWEGLLELLQARLPRKDPAGHRDDLARALGPELGPPGTNDVPEQESHSQPEGW
AEATPVNGHSPALQSQSPVQLPSPACTSTQWPKIKVTRGPATATLAGLEQTGPLGSRSTAKGPSLPELQFQ
PEEPEESEPSRGQDPLTDQKQADSADKRPAEGKAGSPLKGRLVTSWRMPGDRPTLFNPFLLSLGVLAWARP
DLLNFKKGWMSILDEPGEPPSPSLTTTSTSQWKKHWFVLTDSSLKYYRDSTAEEADELDGEIDLRSCTDVT
EYAVQRNYGFQIHTKDAVYTLSAMTSGIRRNWIEALRKTVRPTSAPDVTKLSDSNKENALHSYSTQKGPLK
AGEQRAGSEVISRGGPRKADGQRQALDYVELSPLTQASPQRARTPARTPDRLAKQEELERDLAQRSEERRK
WFEATDSRTPEVPAGEGPRRGLGAPLTEDQQNRLSEEIEKKWQELEKLPLRENKRVPLTALLNQSRGERRG
PPSDGHEALEKEVQALRAQLEAWRLQGEAPQSALRSQEDGHIPPGYISQEACERSLAEMESSHQQVMEELQ
RHHERELQRLQQEKEWLLAEETAATASAIEAMKKAYQEELSRELSKTRSLQQGPDGLRKQHQSDVEALKRE
LQVLSEQYSQKCLEIGALMRQAEEREHTLRRCQQEGQELLRHNQELHGRLSEEIDQLRGFIASQGMGNGCG
RSNERSSCELEVLLRVKENELQYLKKEVQCLRDELQMMQKDKRFTSGKYQDVYVELSHIKTRSEREIEQLK
EHLRLAMAALQEKESMRNSLAE
Human Wildtype TRIODE Isoform 5 cDNA
(SEQ ID NO: 29)
atggaggag gtgcctgggg atgccctgtg tgaacacttt gaggccaaca tacttaccca
gaaccgctgt caaaactgct tccaccctga ggaggcccat ggagcaagat accaggagct
caggagccct tcaggtgctg aggtgcccta ctgcgacctg cctcgatgtc cacctgcccc
tgaggaccca ctcagcgcct caacctccgg ctgccagtct gtggtggacc caggcctcag
gccagggccc aagaggggcc catccccctc agcagggctc ccagaagagg gtcccacagc
tgcccccagg agcaggagcc gggagcttga ggcagtaccc tatctggagg gcctgaccac
ttccttgtgt ggcagctgca acgaggaccc cggctctgac cccacctcca gccctgactc
cgccacccct gatgatacca gcaactcgtc ctctgtggac tgggacactg ttgagaggca
ggaggaggag gcccccagct gggacgagct cgcagtgatg atcccgagga ggcctcggga
ggggccgaga gctgacagct cccaaagggc tccgtctctc ctcaccaggt cccctgtggg
aggagatgct gcaggccaga aaaaggagga caccggcggt gggggccgga gcgcaggaca
gcactgggca aggctccggg gagaaagcgg gttgtccctg gagcggcacc ggtcaacact
gacccaggct tcctccatga caccacacag tggacctcga agcaccacgt ctcaggcttc
tcctgcccaa agggacactg ctcaggctgc ctctacacgt gaaatcccca gagcctcctc
tccccatcga atcacccaaa gggacacctc cagggcctca tccacccaac aggaaatctc
cagggcctca tccacccaac aggaaacctc cagggcctca tccacccaag aggacacccc
tagggcctca tccacccaag aggacacccc cagggcctca tctacacagt ggaacacccc
cagagcttcc tctccctcac gaagcaccca actggataac cccagaacct cttctaccca
gcaggacaac ccccaaactt cttttcctac ttgtactccc cagcgggaaa accccaggac
accctgtgtc cagcaggacg atcccagagc ctcctctccc aacagaacca ctcaacgaga
gaattccaga acatcctgtg cccagcggga caatcccaaa gcctccagaa cctcctctcc
caatagagcc acacgagaca accccagaac atcctgcgcc cagcgggaca atcccagagc
ctcctctccc agtagagcta cacgagacaa ccccacaaca tcctgtgccc agcgggacaa
tcccagagcc tccagaacct cctctcccaa tagagccaca cgagacaacc ccagaacatc
ctgtgcccag cgggacaatc ccagagcctc ctctcccagt agagctacac gagacaaccc
cacaacatcc tgtgcccagc gggacaatcc cagagcctcc agaacctcct ctcccaatag
agccacacga gacaacccca gaacatcctg cgcccagcgg gacaatccca gagcctcctc
tcccaataga gctgcacgag acaaccccac aacatcctgt gcccagcggg acaatcccag
agcctccaga acctcctctc ccaatagagc cacacgagac aaccccagaa catcctgtgc
ccagcgggac aatcccagag cctcctctcc caatagagct acacgagaca accccacaac
atcctgtgcc cagcgggaca atcccagagc ctccagaacc tcctctccca atagagccac
acgagataac cccagaacat cctgtgccca gcgggacaat cccagagcct cctctcccaa
cagaaccacc caacaagaca gccccagaac atcctgtgcc cgacgggacg atcccagagc
ctcctctcct aacagaacca tccaacaaga gaaccccaga acatcctgtg ccctacggga
caatcccaga gcctcctctc ccagcagaac catccaacaa gagaacccca gaacatcctg
tgcccaacgg gacgatccca gagcctcctc tcctaacaga accacccaac aagagaaccc
cagaacatcc tgtgcccgac gggacaatcc cagagcctcc tctcgcaaca gaaccatcca
gcgagacaac cccagaacat cctgtgccca gcgggacaat cccagagcct cctctcctaa
cagaaccatc caacaagaga acctcagaac atcctgtacc cgacaggaca atcccaggac
ctcctctccc aatagagcca cacgagacaa ccccagaaca tcctgtgccc agcgggacaa
tctcagagcc tcctctccca tcagagccac ccaacaggac aaccccagaa cttgtattca
acagaacatc cccagatcat cttctaccca acaagacaac cctaaaacct cttgtaccaa
acgagataac ctcagaccca cttgtacaca gcgggaccgc acacagtcct tttcctttca
acgagacaac cctggaacct cctcatctca atgctgcacc caaaaggaga atctgagacc
atcatctccc caccgctcca ctcaatggaa caatcccagg aattcatctc cccatcgtac
taacaaagac atcccctggg cctcgtttcc cctccggcca actcagagtg atggtccccg
aacctcttcc ccatctcgct ccaagcaaag cgaggttccc tgggcatcca tcgccctccg
gccaacccaa ggtgacaggc ctcagacatc ctctcccagc aggccagccc agcatgaccc
accccagtcc tcctttggcc ccacccagta caacttgcca tcccgggcca cctcttcctc
ccataaccca ggccaccaga gcacctcccg aacttcctca cctgtgtacc ccgctgccta
tggggctccc ctgacctctc ctgagccctc ccagcctcca tgtgctgtgt gcattgggca
ccgggatgcc cctcgagcct cttcgccccc tcgctatttg cagcacgacc ccttcccctt
cttcccagag ccccgcgccc ctgagagtga accgccccac cacgagcctc cctatatacc
acctgctgtg tgcattggac accgagatgc cccccgggcg tcctcgcccc cccgccacac
ccaatttgac cccttcccct tcctcccaga cacatcagat gccgagcatc agtgtcagtc
cccccaacac gagccccttc agctccctgc acctgtgtgt attgggtacc gagatgcacc
ccgggcctcc tccccaccac gccaggcccc agagccttcc ctcttattcc aggacctccc
cagggccagc acagagagcc ttgtcccttc catggactct ctgcacgagt gcccccacat
ccccacccct gtgtgcattg ggcaccggga tgcaccctcc ttctcatccc caccacgcca
ggctcctgag ccatccctct tcttccagga tccccctgga actagtatgg agagcctggc
cccctccact gactctctgc atggctcccc agtgctgatc ccccaagtgt gcatcgggca
ccgggatgca ccccgagcct cctccccacc ccgccaccca cccagtgacc tagcgttcct
ggcaccctca ccttcaccgg gcagctctgg gggctcccgg ggctcagcgc ctcccgggga
gaccaggcac aacttggagc gggaggagta cactgtgctg gccgacctgc ccccacccag
gaggctggcc cagagacagc cagggcccca ggcgcagtgc agcagcgggg gccgcaccca
cagccctggc cgtgcagagg tggagcgcct cttcgggcaa gagcgcagga agtccgaggc
agcgggggcc ttccaggccc aggacgaggg acggtcacag cagcccagcc aaggccagag
ccaacttctc cgaagacagt ccagccctgc ccccagcagg caggtgacca tgctccctgc
caaacaggca gaactgaccc ggcggagcca agcagagccc cctcatcctt ggagtcctga
gaagagacct gagggagatc ggcagctcca ggggtccccg ctgcccccca ggacatcagc
caggacccct gagagggagc tgcggacaca gagacctctg gagagtggcc aagcaggccc
aagacagcct ctgggggtgt ggcagagtca ggaggaaccg ccagggtccc agggccctca
tagacaccta gaaaggagct ggagcagcca ggagggaggc ctgggccctg ggggctggtg
gggatgtgga gagcccagcc tgggggcagc caaagccccg gagggagcat gggggggcac
ttccagggag tacaaggaga gctgggggca gccagaggcc tgggaggaga agcccactca
tgagctcccc agagaactag gaaagagaag cccactcacg agcccccctg agaactgggg
aggccccgca gagtcctcac aatcctggca ctctgggaca cccactgctg tgggctgggg
ggcagaggga gcgtgtccat acccgcgtgg ctctgagagg cgacccgagc ttgactggag
ggatctgctt ggccttctcc gggcaccagg agagggggtc tgggcccgtg tccccagcct
ggactgggag ggcctcttgg agctcctgca ggccaggctg ccccgcaagg acccagctgg
acacagggat gacctggcca gggctttagg gccagagctg ggtcccccag gcacaaacga
tgtccctgag caggagtcac acagccagcc agaaggctgg gccgaggcca ccccagtcaa
tggacacagc cccgcactgc agtcccagag cccggtccag ctgcccagcc ctgcctgcac
ctccacccag tggccaaaga tcaaagtgac aagaggacca gcgaccgcaa ctctggcagg
cctggagcag acgggccccc tggggagcag gagcactgcg aagggcccca gcttgccaga
gctgcagttc caaccagagg agcctgagga gtcagaacca agcagaggcc aagaccccct
gactgaccag aagcaggcag actcggcaga caagaggcca gcagagggca aggctgggag
cccgctcaag ggccgactgg tgacctcatg gcggatgccc ggggaccggc ccacgctgtt
caatccgttc ctgctgtctc tgggggtcct caggtggcga aggcccgatc tgctcaactt
caagaaggga tggatgtcga tcttggacga gcctggagag cctccctccc cctcgctcac
caccacctct acttcgcagt ggaagaaaca ttggtttgtg ctgacagatt caagtctcaa
atattacaga gactccactg ctgaggaggc agatgagctg gatggtgaga tcgacctgcg
ttcctgcacg gatgtcactg agtacgcggt gcagcgcaac tatggcttcc agatccacac
caaggatgct gtctatacct bitcggccat gacctcaggc atccggcgga actggatcga
ggctctgaga aagaccgtac gtccaacttc agccccagat gtcaccaagc tctcggactc
taacaaggag aacgcgctgc acagctacag cacccagaag ggccccctga aggcagggga
gcagcgggcg ggctctgagg tcatcagccg gggtggccct cggaaggcgg acgggcagcg
tcaggccttg gactacgtgg agctctcgcc gctgacccag gcttccccgc agcgggcccg
caccccagcc cgcactcctg accgcctggc caagcaggag gagctggagc gggacctggc
ccagcgctcc gaggagcggc gcaagtggtt tgaggccaca gacagcagga ccccagaggt
gcctgctggt gaggggccgc gccggggcct gggtgccccc ctgactgagg accagcaaaa
ccggcttagt gaggagatcg agaagaagtg gcaggagctg gagaagctgc ccctgcggga
gaataagcgg gtgcccctca ctgccctgct caaccaaagc cgcggagagc gccgagggcc
cccaagtgac ggccacgagg cactggagaa ggaggttcag gctcttcggg cccagctgga
ggcgtggcgt ctccaagggg aggctcctca gagtgcactg agatcccagg aggatggcca
catccccccg ggctacatct cacaggaggc atgtgagcgc agcctggcag agatggagtc
ctcgcaccag caggtgatgg aggagctgca gcggcaccac gagcgggagc tgcagcgcct
gcagcaggag aaggagtggc tcctggctga ggagacggca gccacggcct cagccattga
agccatgaag aaggcctacc aggaagagct gagccgagag ctgagcaaaa cacggagtct
ccagcagggc ccggatggcc tccggaagca gcaccagtca gatgtggagg cactgaagcg
agagctgcag gtgctatcgg agcagtactc gcagaagtgc ctggagattg gggcactcat
gcggcaggct gaggagcgcg agcacacgct gcgccgctgc cagcaggagg gccaggagct
gctgcgccac aaccaggagc tgcatggccg cctgtcagag gagatagacc agctgcgcgg
cttcattgcc tcgcagggca tgggcaatgg ctgcgggcgc agcaacgagc ggagttcctg
cgagctagag gtgctgcttc gcgtaaaaga aaacgaactc cagtacctaa agaaggaggt
gcagtgcctc cgggacgagc tccagatgat gcagaaggac aagcgcttca cctcgggaaa
gtaccaggac gtctatgtgg agctgagcca catcaagaca cggtctgagc gggagatcga
gcagctgaag gagcacctgc gtcttgccat ggccgccctc caggagaagg agtcgatgcg
caacagcctg gctgagtag
Human Full-length Wildtype TRIOBP Protein Isoform 1
(SEQ ID NO: 30)
MTPDLLNFKKGWMSILDEPGEPPSPSLTTTSTSQWKKHWFVLTDSSLKYYRDSTAEEADELDGEIDLRSCT
DVTEYAVQRNYGFQIHTKDAVYTLSAMTSGIRRNWIEALRKTVRPTSAPDVTKLSDSNKENALHSYSTQKG
PLKAGEQRAGSEVISRGGPRKADGQRQALDYVELSPLTQASPQRARTPARTPDRLAKQEELERDLAQRSEE
RRKWFEATDSRTPEVPAGEGPRRGLGAPLTEDQQNRLSEEIEKKWQELEKLPLRENKRVPLTALLNQSRGE
RRGPPSDGHEALEKEVQALRAQLEAWRLQGEAPQSALRSQEDGHIPPGYISQEACERSLAEMESSHQQVME
ELQRHHERELQRLQQEKEWLLAEETAATASAIEAMKKAYQEELSRELSKTRSLQQGPDGLRKQHQSDVEAL
KRELQVLSEQYSQKCLEIGALMRQAEEREHTLRRCQQEGQELLRHNQELHGRLSEEIDQLRGFIASQGMGN
GCGRSNERSSCELEVLLRVKENELQYLKKEVQCLRDELQMMQKDKRFTSGKYQDVYVELSHIKTRSEREIE
QLKEHLRLAMAALQEKESMRNSLAE
Human Full-length Wildtype TRIOBP Protein Isoform 4
(SEQ ID NO: 31)
MIPRRPREGPRADSSQRAPSLLTRSPVGGDAAGQKKEDTGGGGRSAGQHWARLRGESGLSLERHRSTLTQA
SSMTPHSGPRSTTSQASPAQRDTAQAASTREIPRASSPHRITQRDTSRASSTQQEISRASSTQQETSRASS
TQEDTPRASSTQEDTPRASSTQWNTPRASSPSRSTQLDNPRTSSTQQDNPQTSFPTCTPQRENPRTPCVQQ
DDPRASSPNRTTQRENSRTSCAQRDNPKASRTSSPNRATRDNPRTSCAQRDNPRASSPSRATRDNPTTSCA
QRDNPRASRTSSPNRATRDNPRTSCAQRDNPRASSPSRATRDNPTTSCAQRDNPRASRTSSPNRATRDNPR
TSCAQRDNPRASSPNRAARDNPTTSCAQRDNPRASRTSSPNRATRDNPRTSCAQRDNPRASSPNRATRDNP
TTSCAQRDNPRASRTSSPNRATRDNPRTSCAQRDNPRASSPNRTTQQDSPRTSCARRDDPRASSPNRTIQQ
ENPRTSCALRDNPRASSPSRTIQQENPRTSCAQRDDPRASSPNRTTQQENPRTSCARRDNPRASSRNRTIQ
RDNPRTSCAQRDNPRASSPNRTIQQENLRTSCTRQDNPRTSSPNRATRDNPRTSCAQRDNLRASSPIRATQ
QDNPRTCIQQNIPRSSSTQQDNPKTSCTKRDNLRPTCTQRDRTQSFSFQRDNPGTSSSQCCTQKENLRPSS
PHRSTQWNNPRNSSPHRTNKDIPWASFPLRPTQSDGPRTSSPSRSKQSEVPWASIALRPTQGDRPQTSSPS
RPAQHDPPQSSFGPTQYNLPSRATSSSHNPGHQSTSRTSSPVYPAAYGAPLTSPEPSQPPCAVCIGHRDAP
RASSPPRYLQHDPFPFFPEPRAPESEPPHHEPPYIPPAVCIGHRDAPRASSPPRHTQFDPFPFLPDTSDAE
HQCQSPQHEPLQLPAPVCIGYRDAPRASSPPRQAPEPSLLFQDLPRASTESLVPSMDSLHECPHIPTPVCI
GHRDAPSFSSPPRQAPEPSLFFQDPPGTSMESLAPSTDSLHGSPVLIPQVCIGHRDAPRASSPPRHPPSDL
AFLAPSPSPGSSGGSRGSAPPGETRHNLEREEYTVLADLPPPRRLAQRQPGPQAQCSSGGRTHSPGRAEVE
RLFGQERR
Human Full-length Wildtype TRIOBP Protein Isoform 6
(SEQ ID NO: 32)
MEEVPGDALCEHFEANILTQNRCQNCFHPEEAHGARYQELRSPSGAEVPYCDLPRCPPAPEDPLSASTSGC
QSVVDPGLRPGPKRGPSPSAGLPEEGPTAAPRSRSRELEAVPYLEGLTTSLCGSCNEDPGSDPTSSPDSAT
PDDTSNSSSVDWDTVERQEEEAPSWDELAVMIPRRPREGPRADSSQRAPSLLTRSPVGGDAAGQKKEDTGG
GGRSAGQHWARLRGESGLSLERHRSTLTQASSMTPHSGPRSTTSQASPAQRDTAQAASTREIPRASSPHRI
TQRDTSRASSTQQEISRASSTQQETSRASSTQEDTPRASSTQEDTPRASSTQWNTPRASSPSRSTQLDNPR
TSSTQQDNPQTSFPTCTPQRENPRTPCVQQDDPRASSPNRTTQRENSRTSCAQRDNPKASRTSSPNRATRD
NPRTSCAQRDNPRASSPSRATRDNPTTSCAQRDNPRASRTSSPNRATRDNPRTSCAQRDNPRASSPSRATA
DNPTTSCAQRDNPRASRTSSPNRATRDNPRTSCAQRDNPRASSPNRAARDNPTTSCAQRDNPRASRTSSPN
RATRDNPRTSCAQRDNPRASSPNRATRDNPTTSCAQRDNPRASRTSSPNRATRDNPRTSCAQRDNPRASSP
NRTTQQDSPRTSCARRDDPRASSPNRTIQQENPRTSCALRDNPRASSPSRTIQQENPRTSCAQRDDPRASS
PNRTTQQENPRTSCARRDNPRASSRNRTIQRDNPRTSCAQRDNPRASSPNRTIQQENLRTSCTRQDNPRTS
SPNRATRDNPRTSCAQRDNLRASSPIRATQQDNPRTCIQQNIPRSSSTQQDNPKTSCTKRDNLRPTCTQRD
RTQSFSFQRDNPGTSSSQCCTQKENLRPSSPHRSTQWNNPRNSSPHRTNKDIPWASFPLRPTQSDGPRTSS
PSRSKQSEVPWASIALRPTQGDRPQTSSPSRPAQHDPPQSSFGPTQYNLPSRATSSSHNPGHQSTSRTSSP
VYPAAYGAPLTSPEPSQPPCAVCIGHRDAPRASSPPRYLQHDPFPFFPEPRAPESEPPHHEPPYIPPAVCI
GHRDAPRASSPPRHTQFDPFPFLPDTSDAEHQCQSPQHEPLQLPAPVCIGYRDAPRASSPPRQAPEPSLLF
QDLPRASTESLVPSMDSLHECPHIPTPVCIGHRDAPSFSSPPRQAPEPSLFFQDPPGTSMESLAPSTDSLH
GSPVLIPQVCIGHRDAPRASSPPRHPPSDLAFLAPSPSPGSSGGSRGSAPPGETRHNLEREEYTVLADLPP
PRRLAQRQPGPQAQCSSGGRTHSPGRAEVERLFGQERRKSEAAGAFQAQDEGRSQQPSQGQSQLLRRQSSP
APSRQVTMLPAKQAELTRRSQAEPPHPWSPEKRPEGDRQLQGSPLPPRTSARTPERELRTQRPLESGQAGP
RQPLGVWQSQEEPPGSQGPHRHLERSWSSQEGGLGPGGWWGCGEPSLGAAKAPEGAWGGTSREYKESWGQP
EAWEEKPTHELPRELGKRSPLTSPPENWGGPAESSQSWHSGTPTAVGWGAEGACPYPRGSERRPELDWRDL
LGLLRAPGEGVWARVPSLDWEGLLELLQARLPRKDPAGHRDDLARALGPELGPPGTNDVPEQESHSQPEGW
AEATPVNGHSPALQSQSPVQLPSPACTSTQWPKIKVTRGPATATLAGLEQTGPLGSRSTAKGPSLPELQFQ
PEEPEESEPSRGQDPLTDQKQADSADKRPAEGKAGSPLKGRLVTSWRMPGDRPTLFNPFLLSLGVLRWRRP
DLLNFKKGWMSILDEPGEPPSPSLTTTSTSQWKKHWFVLTDSSLKYYRDSTAEEADELDGEIDLRSCTDVT
EYAVQRNYGFQIHTKDAVYTLSAMTSGIRRNWIEALRKTVRPTSAPDVTKLSDSNKENALHSYSTQKGPLK
AGEQRAGSEVISRGGPRKADGQRQALDYVELSPLTQASPQRARTPARTPDRLAKQEELERDLAQRSEERRK
WFEATDSRTPEVPAGEGPRRGLGAPLTEDQQNRLSEEIEKKWQELEKLPLRENKRVPLTALLNQSRGERRG
PPSDGHEALEKEVQALRAQLEAWRLQGEAPQSALRSQEDGHIPPGYISQEACERSLAEMESSHQQVMEELQ
RHHERELQRLQQEKEWLLAEETAATASAIEAMKKAYQEELSRELSKTRSLQQGPDGLRKQHQSDVEALKRE
LQVLSEQYSQKCLEIGALMRQAEEREHTLRRCQQEGQELLRHNQELHGRLSEEIDQLRGFIASQGMGNGCG
RSNERSSCELEVLLRVKENELQYLKKEVQCLRDELQMMQKDKRFTSGKYQDVYVELSHIKTRSEREIEQLK
EHLRLAMAALQEKESMRNSLAE

[0147] A non-limiting example of a human wildtype TRIOBP genomic DNA sequence is SEQ ID NO: 33. The exons in SEQ ID NO: 33 are: nucleotide positions 1-102 (exon 1), nucleotide positions 601-709 (exon 2), nucleotide positions 4319-4492 (exon 3), nucleotide positions 13440-13579 (exon 4), nucleotide positions 16223-16424 (exon 5), nucleotide positions 18776-18947 (exon 6), nucleotide positions 26198-29516 (exon 7), nucleotide positions 36311-36425 (exon 8), nucleotide positions 37412-38455 (exon 9), nucleotide positions 41655-41732 (exon 10), nucleotide positions 43908-44045 (exon 11), nucleotide positions 54785-54841 (exon 12), nucleotide positions 57890-57997 (exon 13), nucleotide positions 58114-58203 (exon 14), nucleotide positions 58563-58672 (exon 15), nucleotide positions 60626-61151 (exon 16), nucleotide positions 62167-62277 (exon 17), nucleotide positions 68683-68830 (exon 18), nucleotide positions 71087-71189 (exon 19), nucleotide positions 72041-72200 (exon 20), nucleotide positions 72275-72388 (exon 21), nucleotide positions 74663-74749 (exon 22), nucleotide positions 75614-75777 (exon 23), and nucleotide positions 76796-79569 (exon 24). The introns are located between each pair of these exons in SEQ ID NO: 33, i.e., at nucleotide positions 103-600 (intron 1), nucleotide positions 710-4318 (intron 2), nucleotide positions 4493-13439 (intron 3), nucleotide positions 13580-16222 (intron 4), nucleotide positions 16425-18775 (intron 5), nucleotide positions 18948-26197 (intron 6), nucleotide positions 29517-36310 (intron 7), nucleotide positions 36426-37411 (intron 8), nucleotide positions 38456-41654 (intron 9), nucleotide positions 41733-43907 (intron 10), nucleotide positions 44046-54784 (intron 11), nucleotide positions 54842-57889 (intron 12), nucleotide positions 57998-58113 (intron 13), nucleotide positions 58204-58562 (intron 14), nucleotide positions 58673-60625 (intron 15), nucleotide positions 61152-62166 (intron 16), nucleotide positions 62278-6862 (intron 17), nucleotide positions 68831-71086 (intron 18), nucleotide positions 71190-72040 (intron 19), nucleotide positions 72201-72274 (intron 20), nucleotide positions 72389-74662 (intron 21), nucleotide positions 74750-75613 (intron 22), and nucleotide positions 75778-76795 (intron 23).

| Human Wildtype TRIOBP Genomic Sequence (NCBI Accession No. NG_012857.1) | |
|---|---|
| (SEQ ID NO: 33) | |
| 1 | cttccacctc ccgagcatcg ctctgattca ttgttaaaat aaagaggcca tgaccctggc |
| 61 | actcccaccc cggcagcccc tgtgcgtgga aacccagcca aggttagcac tgggcctcag |
| 121 | aaaagaggag ctggtagggg gaggcctaca ggaggggtag gggtcgaggg atccggggag |
| 181 | gaactggctg aatgcctgga tggagagggt cccgggtcca ttctctgggt ggggcatgtg |
| 241 | tagctgctta aggttttgat tattatatcc acatctcaag tgcattttag agaaggattc |
| 301 | tgcctattgg ttgtgggtag gggaggaaac gggagcagcg aggggcacgt ggagtagagc |
| 361 | cccctaccca cccccaggaa aatgagcggc gttctcctgc taggcgacgc tcctttatgt |
| 421 | ggccagacca ggagagaaac gcccaggacg ggcggggccg atgcgcccct cttccaccac |
| 481 | caggagtcgg gaggacgacc gcccggggag gatcagagac cctggggcca cggaaggacc |
| 541 | agtgggtagc cctctcccca ccgtgccttg ctgtcgcccc caccgcattc ccttctccag |
| 601 | gtctgatgat ggaggagcct tggccctggc tgtcccaggg gaggaggtga aattcctcag |
| 661 | ctctccacca agattggcca caaaagcctg atcccctgga acacagcagg tgaggatgga |
| 721 | tgtgggcagg tgacctgggg gcaccaaaag ctgcaggtgt tttgggatgt tgggttcctc |
| 781 | ccacccccca ccctccccct ggggctctgt gtgagtgggg aggccatctt taagtgattc |
| 841 | tcctgaccca gctccactcc agggcatgga tgttggtggc cttaggggca cccagaaagg |
| 901 | agaacccttg cacaagtaag ataccagggc ggccgggcgc ggtggctcaa gcctgtaatc |
| 961 | ccagcacttt gggaggtcga ggtgggtgga tcacaaggtc aggagttcga gaccagcctg |
| 1021 | gcccatatgg tgaaacctcg tctctaccaa aaatacaaaa aaattatccg ggcatggtgg |
| 1081 | cacatgcctg taatcccagc tatttgggag gctgcggcag gagaattgct tgaatccggg |
| 1141 | aggcagaggt tgcagtgagc cgagatcgcg ccactgcact ccagcctggg tgatagaccg |
| 1201 | agattctgtc tcaaaaaaaa aaaaaaaaaa agaaagaaag acaccagggt ttcagaaggg |
| 1261 | tatgatgctt cacacctgta atcccagcac tttgagggaa ggaggaggat tacttgaggt |
| 1321 | caggagttca ggagttcaaa accagcctgg gtaacactgc aagagccttt tttttttttt |
| 1381 | tttttttttt tgagacacac tgttgcccag gctggagtgc agcggggcga tcttagctcc |
| 1441 | actgcaacct ccacctcctg ggttcaagca attctcttgc cccagcctct tgagtagctg |
| 1501 | ggattacagg catgcgcacc acgcccagct aatttttata gttttagtag agacagggtt |
| 1561 | tcatcatgtt gggcaggctg gtcttgaatt cctggcctca agtgatctgc ctgcctcagc |
| 1621 | ctcccaaagt gctgggatta taggcgtgag ccaccgcacc tggccaagag cccattttta |
| 1681 | caaaataaaa aagaaaaaaa ttagctgggc gtggtggcgt acacctgtag tcccagttac |
| 1741 | tcagtcccag agactgaggc aggagaatca tttgagcccg ggagtttgag gttgcaagga |
| 1801 | gctatgatcg agccactgca ctccagcctg ggtgacagag caagaccctg cccccacctc |
| 1861 | cccaaaaaag acattagggg ccggatgcag tggctcacac ctgtaatccc agcattttgg |
| 1921 | gaggccgaag ggggcggatc acctgaggtc aggagttcac ctggccaaca tggcgaaacc |
| 1981 | ccgttgctac taaaaataca aaaattagcc aggcatgacg gtgcatgcct gtgatcccag |
| 2041 | atactactgg ggaggctgag gtagaattgc ttgaacccag gaggcggagg ttgcagtgag |
| 2101 | ccgagtgagc caagatcaca tcacggcact ccagcctagg tgacagagag agacttcgtc |
| 2161 | tcaaaaaaac aaaacaaaac aaaacgaaaa cacattagga tttctttttg gctaagttct |
| 2221 | gccacaaact tgctgtgtga ctttaggctg ttcacgtttg tcaaagacgt cgtcctcaac |
| 2281 | tctgaaaata cctggccagc tttttgcctc cctcgctgtg cttcccaagg gacctgtgcg |
| 2341 | agttggcagt atgatccagt gctcctcact tccacctccg agagagcagg gacacacaca |
| 2401 | gccctggatt tgaatcagcc actgcgacct tcagtgaccg aaggaacctc tctgagcctt |
| 2461 | agttgcctga tctaaaattg gcattaattt gatctacaat gcagctataa gacaaggaca |
| 2521 | ctcaaacttt ggggcgcact agaatcacct ggggaatcac tttttttttt taagacagag |
| 2581 | tctcactctt atcacccagg ctggagtaca gtggtgcaat cttggctcac tgcaacctcc |
| 2641 | gcctcctggg ttcaagtgat tctcctgcct cagcctcccg agtaactggg actacaggtg |
| 2701 | cataccacca tgcctggcta attttgtatt tttagtagag acagggtttg gcaatattgg |
| 2761 | ccaggctggt ctcgaactcc tgacctcagg tgatctgccc gcctcggcct cccaaagtgc |
| 2821 | tgggattata ggcgtgagcc actgcgcctg gccaggaatc gcttctttat tttcattttc |
| 2881 | atttatttat ttatttattt atttattttg agatggagtc tcgctctgtt gctcagtctg |
| 2941 | gagtgaagtg gcgtgctctc cgctcactgc tacctctgcc tcccaggttc aagcgattct |
| 3001 | cgtgcctcag cctcccaagt agctgggact acaggtgcgt gctaccacgc ccagctaatt |
| 3061 | tttgtattta gtagaggcgg ggtttcacca tgttggccag gctggtcttg aactcctggc |
| 3121 | ctcaagtgat ctgcctgcct cagcctccca aagtgctggg attacaggcg tgagccaccg |
| 3181 | ccctcggctg gaatcacttc tttaacatgc acagccccag acctcagtct cttggagatt |
| 3241 | ctaactgtgt gaattgggag agagaaaggg gaatctagat tttttttttt tttttttgag |
| 3301 | atgtggtctt gctatgttgc ctaggctgga gtgctgtaac tattcacagg tgcagttata |
| 3361 | gcacactacc acctcaaact cctgggctca agagatcctc ccacctctgc ctcccgagta |
| 3421 | gcttggactg caggtgcaca ccatcttacc cagctgaaat ctgctttttt tttttctcag |
| 3481 | tgcagtggca cagtcatggc tcactgcagc ctcgacctcc cagactcagg tgatcctccc |
| 3541 | aacttcagcc tcctgagtag cagggaccac aggcctgcac caccttgccc agctaatttt |
| 3601 | tgtatttttt gtagagacgg agtttcgcca gttgcccagg atggtcttga actcttgggc |
| 3661 | tcaaatgatc cgccgcccgc aatgggccca gctggaatct gcattttttt gttttttgtt |
| 3721 | ttgagatgaa gtctcactct gtcgcccagg ctggagtgca atggcgcaat cttggctcac |
| 3781 | tgcaacctcc gcctcctggg ttcaagccat tctcctgcct caggctccca agtagctggg |
| 3841 | attacaggca cgtgccatca cacttggctg atttttgtat ttttagtaga gacagggttt |
| 3901 | taccatattg gccaggctgg tctcgaactc ctgacctcaa gtgatcggcc cacctcggcc |
| 3961 | tcccaaagtg ctgggattac aggcatcagc cactgtgcct ggcctggtat ctgcattttt |
| 4021 | atgaacagcc caggagggtg taatgcagag tccttggcgt gcactttcag caacactgca |
| 4081 | gtaaggacta gaaatcgcac atcaaatgct ggcagagtgc ctggtgctta gtaggtgctt |
| 4141 | agtgagtgtt tgttgagtga ataaatgaac aggaatggat ggagaacagg aacccaaagg |
| 4201 | aatggatgag taaccttatt tccttggtcc ttgtctggaa actggggcaa ctggggctgg |
| 4261 | ggttcaggtg agtggccagc cagtcatctg gtctttgcct ccccctcatt tttgccaggc |
| 4321 | ctcacataga cggtcagcca ttggatcata ggaactgccc tggcctgact cacccaatat |
| 4381 | ggaggaggtg cctggggatg ccctgtgtga acactttgag gccaacatac ttacccagaa |
| 4441 | ccgctgtcaa aactgcttcc accctgagga ggcccatgga gcaagatacc aggtgggcca |
| 4501 | gttttccacg tggttggggt ggtttgtgat gggggcatgg gtgaaggact gggcctgtgg |
| 4561 | tgtccgctaa ctcgcagttg aacccagatg ctggacttcc tcctgtcgag agcctcggtt |
| 4621 | ttcccacatt gcagggaagt ggttgaacca tgtgaatgtt tcacaatctt cagtcacttt |
| 4681 | cctcctgctt atatgatacg attgttacca tagccttatc taatctgtta cttactttgt |
| 4741 | tattctttaa atcaacatct ttttcccctt ctattgaaac aaaacttcac atcatcaaca |
| 4801 | caagtagaaa actagaatta cttcctgtta agaagaagag gttaagaaga aaggtagagg |
| 4861 | ctgggcacgg tggctcacgc ctgtaatccc agcactttgg gaggccgagg tgggtggatc |
| 4921 | acccgaggtc gggagtttga aaccagcctg gccaacatgg tgaaaattag ctgggcatgg |
| 4981 | tggtgcatgc ctgtaatccc agctacttgg gaggctgagg caggagaatc acttgaacct |
| 5041 | gggaggcgga gattgtggtg agccgagatc gcgccattgc actccagcct gggcaacaga |
| 5101 | atgaaactgt ctcaaaaaac aaaacaaaac aaaacaaaaa agagaagaaa ggtagaaaaa |
| 5161 | gaaaaaacaa aacagaaatg tcgttacacc ctaacttgag agtgttttct ttttcttttt |
| 5221 | cttttttttg agacagagtc tcactctgtc gcctgggcta gagtgcaatg gcaatggtgt |
| 5281 | gatctcagct cactgcaatc tctgcctcct aggttcaagc gatcctcccg cctcagcctc |
| 5341 | ccaagtattg ggattacagg tgcctgccac catgcccagc taatttttgt atttttagta |
| 5401 | gaaacggggt ttcgccatat tggccaggct ggtcttaaac tcctgacctc aggtgatcca |
| 5461 | cccgcctcag cctcccaaag tgttgggatt acaggcgtga gccaccgcgc ctggcctcga |
| 5521 | gagtgttttc tatggaaggc tctgagcttg catcctgctg tctctttgtc aaaaagggag |
| 5581 | attagcagat gttagagaga tgttaagaat acaccagcat catctagaga ttttctttct |
| 5641 | ctctctcttt tttttttttt tttttttttt tggagatagg gtcttgctct gtagcacagg |
| 5701 | ctggagtgca gtggtccaac ctatagtaca tggctcactg tagcctcgac ctcccaggct |
| 5761 | caaatgatct tcccaccttg gcctcctgag tagcagggac tacaggcaca tgccaccatg |
| 5821 | gccagctaat tttcttgtaa agatgggatc tcactatgtt gccagggctg gtctcaaatt |
| 5881 | cctgggctca ggtgatcctc ccacctcaac ctctgtaact gcagggatta caggtgtgag |
| 5941 | acactgcacc tggtctcaag attttcttct tcaagttatt gaaggagtga agaagaatcc |
| 6001 | ttttttttct ttcttttttt ttcatttgag acggagtctc tctctgtcgc caggctagag |
| 6061 | ttcagtggct caatctcagc tcactgcaac ctccgtctcc tgggttcaag caattctcct |
| 6121 | gcctcagcct cctgagtacc tgggattaca ggtgcccacc accatgccca gctaattttt |
| 6181 | gtatctttag tagagacagg gtttcaccat gttggtcagt ctggtctcga actcctgacc |
| 6241 | ttgtgatctg tctgcctcgg cttcccaaag tgctgggatt acaggtgtga gccaccgcgc |
| 6301 | ctggccgaga ttttcttctt caagttattg aaggagtgaa gaagagtcct tttctgactt |
| 6361 | tgtgattgat gtagtctgct gccaagcccc catgcatgta aacacagagc acctgataca |
| 6421 | cacgcaatga gaaacctggg actcacgaac ctccgagggc ccttccaacc ttgaccacca |
| 6481 | tggcttcgtc attcccattg gggtctgaag gtcctctttt tttttttttt tttttgagac |
| 6541 | agagtctcgt tctgttgccc aggctggagt acagtggtgc gatctgggct cactgcaagc |
| 6601 | tcggcctccc aggtttatgc cattctcctg cctcagcctc atgagtagct gggacaacag |
| 6661 | gcacccggca ccacgcccag ctaatttttt gtctttttag tagagacagg gtttcaccat |
| 6721 | gttagccagg atggcctcga tcttcctgac ctcgttattc gcccacctcg acctcccaaa |
| 6781 | gtgctgggat tacaggcatg agccaccgcg cccagcttct accagtcttg atacctccaa |
| 6841 | taatagctct cttgtgctca cctgcaagtt caggttcagg gaacagatgc ctgggagtcc |
| 6901 | atctttcatg caaatgactt tcttccagtg gttgggaaga tggcaagaat ggaacaggag |
| 6961 | agccgtggat tcaggctcgt ctgagttcta gtctcaatcc caccatttcc cacccgagac |
| 7021 | cgtgggtcag ctcacaaatt catacgtact gaataggtgc ttaaaatgtg ccaggcatta |
| 7081 | tgctagatga tggggaaatc atgataaatc agaaaggcac agccaggcac agtgactcac |
| 7141 | tcctgtaatc ccagcacttt gggaggccaa ggtgggtgga tcacttggag tttgagacca |
| 7201 | tcctggcaac atggcaaaac cccatctcta caaaaaattt aaaaaattag ctgggcgtag |
| 7261 | tgggatgcgg ctatagtctc agttactcag gaggctgagg tgggagaatc acctgagact |
| 7321 | gggaggcggg ggcttcagtg agccgtgatc gcattactgt atttcagcct gggtgacaga |
| 7381 | gttggaccct gactcagaac agaacagaac agaacagaac agaacagaac agaacagaac |
| 7441 | agaacagaac agtacagaaa acagggagaa ggaggggaag ggggagggga agggggaggg |
| 7501 | ggagagagag gaggagagga ggagagaggg acacatccct ggcttgtctt catggggctt |
| 7561 | atattctagc aagagaaatg cacatgatta tttaatcttg gttgtgataa atgtataaag |
| 7621 | gaacagtaag tggcatgaag gtaaaggata gggcattagg gaaagtttct ccaaaaaaaa |
| 7681 | aaaaatgaca tttcagctgc ttagtaaagg ctgtgcaggc attagcatta gtgaaattgc |
| 7741 | aggaagagga gaggaaggaa ggagaatgtg caaaggccag cctggcacgg cagctcacgc |
| 7801 | ctgtaatccc agcactttgg gaggaagtgc ttggattgag gcaccgaagc aggaagatca |
| 7861 | cttgaactca ggagtttgag accagcctgg gcagcacagt gagaccccat ttctaccaaa |
| 7921 | aaaaaaaaaa aaaaaattag ccaggcagga tggtgcacac ctgtagtccc agctagtcag |
| 7981 | aaggctgatg tgggaggatt actggatccc aggagttcaa ggttgcagtg agccatgagc |
| 8041 | atgccaatgc actccagcct gggcaacaga atgagacctt gtctcaaaaa caaaacaaac |
| 8101 | aaacaggtca ggtgcagtgg ttcatgcctg taatctcagc actttacgag gccgagacgg |
| 8161 | gtggatcacc tgaggtcagg agttcaagac caccctggcc aacatggtga aaccccatct |
| 8221 | ctattaaaaa tacacaaatt agctacatgt ggtggtgggt gcctgtaatc ccaggtactt |
| 8281 | aggaggctga ggcaggagaa tctcttgaac ccaggaggca gaggttgcag tgagccaaga |
| 8341 | ttgcaccact gtactccagc ctgggcaaca gagcgagaat cctctcaaaa caaaacaaac |
| 8401 | aaacaaagaa tatgcaaagg ccctgaggca gaaaggaggc tgcacatcgg gctggagagg |
| 8461 | acaggcaaga ggggggcaca gaggagctat aggacaagga tggagaatgg ggggaggcct |
| 8521 | ggtctcactg gccttgtgcg gctttgtgga catgttgagg acttaggatt ctgaggtttt |
| 8581 | tttctgtttt gtttttgttt ttttttgaga tggagtctcg ctctgtcgca caggctggag |
| 8641 | tgcagaggcg tgatctcggc tcactgcaac ctctgcctcc caggttcaag cgattctcct |
| 8701 | gcctcagcct cccaggtagc tgagactaca ggcatgtact accaaaccca gttaattttt |
| 8761 | gtatttttag tagagatggg gtttcaccat gccgctcagg ctggtcttga actcctggcc |
| 8821 | tcaagcaatc tgccctcctt ggcctcccaa agtgctgaga ttacaagtgt gagccacctc |
| 8881 | gcccggccaa gccacggaag atttcaaata agggagtgac gtgctctgat ttgcattttt |
| 8941 | cacagtcact ctgattgctg ggcagagaga atggagggca gggtggtgag agtgaatcag |
| 9001 | gtgacccgcc aggaaaaggt gcacgtactc atcggtgcca gagatgattg gggctttgag |
| 9061 | atggaggcaa atggacacat ttccgaacta attgagcagg cacgtctaca ggatttgggg |
| 9121 | gtgagggagg ggagaaaccc atggctgact cctgtaattt cttcaggcag ggtacttggg |
| 9181 | ttgggaggtc tgtttggagt tgtctggggc atggtgtggg gtgtcggcag gatacagtgg |
| 9241 | agatgagggg gaagttagtg aattggtggg gctggagctc agagccagac catcacagga |
| 9301 | gatggaggcc tgcgagtctt caggatctgt cactgaccaa agtcttgctc acggatgagc |
| 9361 | ctatcatctg tggaagaaag tgtggaatga gatgagaaca ggcctgggtg gaggccaggg |
| 9421 | aatcagcaga gacagccaag aaggccagag gctaggaggc aaaccccaca gtgtgcccct |
| 9481 | cctccccagg agccaagacc agagatggtt tcaagagagg gggccaggca caatggctcc |
| 9541 | cgcctgtgat cacagcactt taggaggctg aggctaaagg atggcttgaa accaggagtt |
| 9601 | taagaccagc ctagttaaca aagtgagatc ccatctctac aaaacaaaaa atgaactggg |
| 9661 | tgtagtggtg catgcctgca gtcccagcta cttgggaggc tgaggcagga ggattgtttg |
| 9721 | agcccaggag attgaggctg cagtgcactg tgatcatgcc actgccacag caagactatc |
| 9781 | ttaaaaaaaa aaaaaaaaga tcagagaggg gcacgacatc aaatcctcca ctttcttgag |
| 9841 | cttccagttg ctctgatgat gatcaaggct gtgaaactct cctttggcaa atgcatgagg |
| 9901 | ggtgactgtt gtgtctccga gccaggccct gggacccaac tctgggcagg tagcagctcc |
| 9961 | ctgtgtatac cagatgtgat agtaaaaaac tgacactggg ccgggcgcgg tggctcacgc |
| 10021 | ctgtaatccc agcactttgg gaggccgagg cgggtggatc acttgaggtc aggagtttga |
| 10081 | gaccagcctg actagcatgg tgaaatcctg actctactaa aaatacaaaa atacaaaaat |
| 10141 | taacagggtg tggtggcgga tgcctgtaat cccagctact cgggaggctg aggcaggaga |
| 10201 | atttcttgaa tccgggaggc ggaggttgca gtgagccgag atctggccac cgcactccag |
| 10261 | cctgggcgac aagagcgaaa aactccatct caaaaaaaac aaaaaaacct cctgggcccc |
| 10321 | agaagatggc aactgcctct tccagcctct tccacctgcc tgcctgtgca ctcctctgcc |
| 10381 | actctggacc tattccatgg tgccacgtgg tcaggcattg aaggaatggg tgggtttttt |
| 10441 | ttccatcacc ctcagatgct gctgctgggg ttggggcggg tcttccctgg ctgactctgt |
| 10501 | ctgcctcacc cactctctcc ccatctctct gtcaccacag gtctccaggg accaaattta |
| 10561 | gcccattttt cctccaagga ttctggaccc ttggccatat ttgcctctag ctttaggtca |
| 10621 | acagatttct aacatggagt caaaaaatct gtatgtttaa aaaaaaaaaa ttggctggga |
| 10681 | gtggtggctc acgtctgtaa tcccagcact ttgggaggcc gaggcaggtg gatcacctga |
| 10741 | ggtcaggagt tcgagaccac cctggccaac atggtgaaac cccgtctcta ctaaaaatac |
| 10801 | aaaaattagc tgggtatggt ggcggacccc tgtagtccca gctactcagg aggctgaggc |
| 10861 | aggacaattg cttgaacccg ggaggcagag gttgcagtga gctgagatcg cgccattgca |
| 10921 | ctccagcctg ggtgacagag tgagactctg tctcaaaaaa aagaaaaaaa aaaaaaaggc |
| 10981 | cgggcgtggt ggctcacggc tgtaatccca gcactttggg aggccgaggc gggcggatca |
| 11041 | cgagatcagg agatcgagac catcctggct aacacggtga aaccctgtct ctactaaaaa |
| 11101 | tacaaaaaat tagctgggca tggtggcggg cgtccatagt cccagctact cgggaggctg |
| 11161 | aggcaggaga atggcatgaa cccgggaggc ggagcttgca gtgagccaag atcacgccac |
| 11221 | tgcactctag cctgagcgac agagtgagac tccgtctcac aaaaaaaaaa aaaaaaaaaa |
| 11281 | attgaggcca ggcacagtgg ctcatgcctg tgatcccagc actttggccg aggcaggcag |
| 11341 | atcacctgcc atcaggagtt cgagaccagt ctcgccaaca tggcaaaccc ctgtctctac |
| 11401 | taaaaataga aaaattagcc gggcatggtg tcgggcacct gtaatcacag ctactggggt |
| 11461 | ggctgaggca gaagaattgc ttgaacccag gaggcgaagg ttgcagtgag ccgagactgc |
| 11521 | accattgcac tctaacctgg gctataagag cgagactctg tctcaaaaaa aaagcccttt |
| 11581 | acaaatatta actcgtttaa ttctcagaac acccctagga ggtgggtcct gctatcctgc |
| 11641 | cggttttgta gatgaggtaa ctgaggcaca gagaggataa gtcacgtggc ccaggtcttg |
| 11701 | gtcgcttctc agcctccatt tccgagagga gaaaacaatg ctccgaaagg ggaagtcatc |
| 11761 | ggcctgaggt caccagccgg gaaccggagg agccaggatg gggcccgagg tccatctgag |
| 11821 | gccagagcca gtgctgaccc gccagacagg aaatcagagc tggggactga ccgtggggcc |
| 11881 | cactcaagtg ggtggtgtgg ggtggtgacg ggggctgggg tgaaagccag gatgaggtgt |
| 11941 | cacattaggc tagggttcct gctgggcctg gcggggcaga gacccctggt tgatgcctgg |
| 12001 | caagtctctc ctcatttctg ctgtgctgtc ccctgggtgg ccaaggcgcc aggcccggct |
| 12061 | gtggatctga cacctcctgc tgccgagctc tgatcagaat ctggctgcag ggcagggggt |
| 12121 | gaaactgaat cccaccaggc ctcccctggc ctggatgtca cggcagacat cccaacccca |
| 12181 | cttcttggca ctgcctgacc ccagcagtgg ccttcttgga acctggagag cctgtgccca |
| 12241 | ccctgtggtg ccgaccaggc tgctgccttg gccctgggct ctgggctcca gggtccccag |
| 12301 | ggatcccagg cccaggctct tgcccctccc ggctctcagg tgagctgctg ggatcgggtt |
| 12361 | cctgcggttt catgtctttc attgttcttg gctggggccc ggcttatgaa actgtaatga |
| 12421 | ggggcccctg ctcccgaagc cggcccctct aaggtttcca ctgcctcggc ggctgctgcc |
| 12481 | accacagccc ggagtcgggg cctgggaggg cagcagtgtg ggggcctgag ccggagcccc |
| 12541 | ccggggacga gggtgctgac agtcgacagc caccaccacc accagagccc gcagcccagg |
| 12601 | taatccgaga ggaggcgggg cgcagggtgc catggccgct gtctcccacc accaggggag |
| 12661 | ggaactgccg ctctccagag gtggggagga attggggggg gccctggagg tgagcagccg |
| 12721 | ttcccccctg gtgagcccag caccagacca gccttcacag gtgtggcctt gccaaaggtg |
| 12781 | gagggagaga ggagtgggca gctggctcta gcccccgccc ttttcctggg gccttgaccc |
| 12841 | tccagccctg gatcccctgc ctctccttta gtggggcaaa tctcttctgt cctccaagac |
| 12901 | cttgctttcc catctcctct accatcaaac tgcctcttcc tccctcagac ctctcccttc |
| 12961 | tctcagccag cctaatcctt cctcctcgcc cttgtctttt ggccgcaaaa gaccctggtg |
| 13021 | gatccttcta tccacctcgt tctggggcgc acgcacatac atgcatgtat acatgaagtt |
| 13081 | gcactcatgc aaacgtacag atcggtgtac ccgcgggacc tgcgtagaca cgcatgcgca |
| 13141 | agagctcgct ccacctatgt gcacacatgt gcccccaata ccaggccttt atccacacac |
| 13201 | atacctgctc caaggcccat atgtgtacac tcacgtgtgc aggcacacac caggtacctc |
| 13261 | agccagccct cggcttgagt cccaaggggt gcttctagcc tgatgggcag ctccttgaga |
| 13321 | agtgcaggat cccccgagga gatgcctgga gactcccacg ccaccgggag gggctgtgca |
| 13381 | gggggagggg agcccccacg tgggcgctga gctgtctcct ctctccaacc ctggcccagg |
| 13441 | agctcaggag cccttcaggt gctgaggtgc cctactgcga cctgcctcga tgtccacctg |
| 13501 | cccctgagga cccactcagc gcctcaacct ccggctgcca gtctgtggtg gacccaggcc |
| 13561 | tcaggccagg gcccaagagg tgggtagagt cccagggccc aggaagggct tcatggggtg |
| 13621 | gaatgccctc acccttccca tttgcactcc ttccccaagg cagcacctgt ctctaatggc |
| 13681 | tgctggcatg ggtcacgtgg tcagtcctct aaacctaggc acaggtgggt ggtgggcatg |
| 13741 | ctccttgggc ccacaggaag aactcagatc acaccaccct gtttgcactt cagtggctga |
| 13801 | gcctcccctc cccagtcctg gctgtctctc ccaggggccc tgcccacccc ataacctccc |
| 13861 | aagaccgagc tcagctttgc cccagggtgt gtggctgctg tacactcacc ttgcagtggg |
| 13921 | catggccaca gcctactcac atttcctggt tccctttgca cagctttaaa agattaaaca |
| 13981 | gtccctgcac ccaggggcac ctgctgtcac ccacctacgt gggtgtgcac tgctccaggc |
| 14041 | tctggggttc cttccaccct caggcctgag tggcagtccc cctttaaggt catggtacct |
| 14101 | tgggaggcca tggtctgaga gtctagaaac ctgggttcca gcttcagatc catccctgat |
| 14161 | gggtcttgag caagttactc tgtctttctg tgtctcagtt tccctctctg taaaataaga |
| 14221 | gggattgaat taaatcagca ttgtgctggg atcattcatg tgctcctcac aggtaggcat |
| 14281 | attaaaacaa acaaacaaac aaaaaaacag cctgggtgca gtggctcatg cctgtaattc |
| 14341 | cagaactttg ggaggccaag gtgggcggat cacttgaggt caggaggtcg agaccagcct |
| 14401 | gaccaacatg gcgaaaccct gtctctacta actatacaaa aattagccag gcatggtggc |
| 14461 | aggtgcctgt aatcccagct gctcgggagg ctgaggcagg agaaccactt gaacccggga |
| 14521 | ggcagaggtt gcagtgagtt gagatcgtgc cattacactc cagcctgggt gacacagcga |
| 14581 | ggctccgtct caaaaaaaaa aaaaacaaca aaaaaaaaaa acaaaaaaaa acccacaaaa |
| 14641 | aaacgaaaaa aaaaacaaag acagctttgt tatcaagtat gtttcagaaa gtctgggata |
| 14701 | aatgaagttg aatagctttc ctgcaggact tgtcagagcc tttagcttgc ctgcgtgcat |
| 14761 | cgtggctttt gggtaacgga agtagagaag tatgtcattt gactacagag ctctttttta |
| 14821 | tggccatcac ttattatcat cgtgtaggcc agtctgtggg tcactctttg gggatactgc |
| 14881 | cagcgctaag ccttcttgag cctgtgactt cttttaaagc agagccttct ctgcagctcc |
| 14941 | ctccctcagc atctgggcta gtgaacccgt caatgcctgt ggagccatgc tgcctctcac |
| 15001 | atcctcgtta gccaagcatg agtctgtctt cttagactta ctgaacttgg ggtcagtaga |
| 15061 | ctaagactaa gacttaaagt tggggctggg gcaatagttt tggttcataa cacagctctg |
| 15121 | ccctttccta tctcggtgac cttggccagt ctcttgacct ctctgagcct cagtgtcttc |
| 15181 | ctctgtgaaa tgggaattat tattattatt attattttga gatggcatct tgctctatca |
| 15241 | cccaagctgg agtgcaatga cacgatgttg gctcactgca acctcagcct cccgagtagc |
| 15301 | tgggattcca ggcatacacc accacacccg actaattttt gtatttttat ttatttattt |
| 15361 | ttgagataga gtctcgtgct gtcacccagg ctggagcgca atggcacgat cttggctcac |
| 15421 | tgcaacctcc acctcctggc ttcaagcgat tatcttgcct cagcctcctg agtagctggg |
| 15481 | attacaggtg tgtgccacca ccatgcccat ctaatttttt tatttttagt agagacgggg |
| 15541 | tttcaccatg ttggacaggc tagtctcgga ctactgacct caggtgatcc acccaccttg |
| 15601 | acctcccaaa gtgctaggat ttcaggtgtg agccactgcg cccggcctaa aatgggaatt |
| 15661 | attatactta ctttaaaggg atgctgttgc tgggcgcagt ggctcacgcc tgtaatccca |
| 15721 | gcactttggg agtccgagac gggcggatca cgaggtcagg agatcgagac catcctggct |
| 15781 | aacacggtga aaccccatct ctactaaaaa atacaaaaaa ttagccaggc gtggtggcgg |
| 15841 | gcgcctgtag tcccagctac tggggaggct gaggcaggag aatggcatga acctgggagg |
| 15901 | cagagattgc agtgagccga gatggtgcca ctgcactcca gcctgggtga cagagcgaga |
| 15961 | ctctgtctca aaataaataa ataaataaat aaataaataa ataaataaat aataaaatta |
| 16021 | caaaaaaaaa agggatgctg ttttagctca atgaggcaat ccatataaaa agtctgacac |
| 16081 | agaggcagct ctcaccattg gctccctttc ccacaccagc gtgtgggccc caggctccct |
| 16141 | gtgtgagtga gtgcatatgc ctgggtgggg tgggggatgc tcctaactcc ccattacttt |
| 16201 | ttgggtctgt ctcctctccc aggggcccat ccccctcagc agggctccca gaagagggtc |
| 16261 | ccacagctgc ccccaggagc aggagccggg agcttgaggc agtaccctat ctggagggcc |
| 16321 | tgaccacttc cttgtgtggc agctgcaacg aggaccccgg ctctgacccc acctccagcc |
| 16381 | ctgactccgc cacccctgat gataccagca actcgtcctc tgtggtgagc caggagtggg |
| 16441 | agtttggggg acaagagtgg ctcacacctc catctgcagc cctgggtccc acctaaacct |
| 16501 | ccaggccagg gctgagcctc acaccaggga atccgacgag gtcctctgga ccattagctg |
| 16561 | gcagctcggg ccaccccggc gaacccctgg agagtgggga tttctgcaca ggctggccca |
| 16621 | gggcagctgg ggtctggctg tgaaaagaca gggaaaggag tttcagccga caggagctct |
| 16681 | gggtgaatca ccagcaggct cgggctgcca catgctctca gatcccagag tgttgggttt |
| 16741 | ggtgtctagc gcaagagtgg cacagggccc cagggccctg ccctcgacac acagtgctga |
| 16801 | gtcccatggc cagccctgga atagatttcc aagagacaga ggaaagggag caggctgcgg |
| 16861 | gggtcattta accacgaaaa gagaagagcc agcagtcttt cctccagcat ttgcattttg |
| 16921 | aggggctgcc gcagagcaga agagacaggc ttgtcccagg agacccccca aaaggaaaat |
| 16981 | gacagggggt ggtgataaga ctcagaataa aacaacccag cctcacacgc ttcatggcca |
| 17041 | gctccatgct aagggcttgg tgggtgtggg ctcaggggag actcaccaca gcctcagaag |
| 17101 | tggagatttc agtcgcccca tatggggctg aggctcagcg gggggagcaa cttagtggag |
| 17161 | gccacacatc tgggaagtag tggggctagg atttgaaccc acttttctct ggcccctggg |
| 17221 | gctacctcac acagtcccac atgcggaact ctgggactct gggcaaagct cttggcttca |
| 17281 | atggatgtac atgcctccta ggtccgttga agatgagcga cttggcactt agcacctgct |
| 17341 | agagcccagc acagtgccag gcaaacagca catgctttta atttaattga ttgattgaag |
| 17401 | actgggtgcg gtggctcacg cctgtaatcc cagcactttg ggaggccaag gtgggcggat |
| 17461 | cacctgaagt caggagatcg agaccagcct ggccaacatg gtgaaactct gtctctacta |
| 17521 | aaaatacaaa aattagcagg gtgtggtggt gggcacctgt aatcccagct acttgggagg |
| 17581 | ctgagacagg agaatcgctt gaacccggga ggttgcagtg agcttagatt gcaccattgc |
| 17641 | actccagcct gggcaacaag agcaaaactc cgtcttaaat agagaaaaaa aaaaaagttg |
| 17701 | attgattgag acagggtctt gctccattgc ccagactgga atgcaatgat gtgaacatgg |
| 17761 | ctcactacag ccttgacttc ctgggctcaa gtgatccccc cacctcagcc tcctcagtag |
| 17821 | ctgggactat aggcatgcac aaccatgcct agttattatt atttttttta attttgtaga |
| 17881 | gacagggtct cactgtgttg cccagcctgg aagtgctttt tactgaggcc atggagcgga |
| 17941 | gtctacacca cagaaggtgt ggcaccactc actgtcacct cttggggaca gaacttgaca |
| 18001 | gtttaggaag tgctttttat tttttattta attttattta tttttgagat ggagtcttgc |
| 18061 | tctgtcacct gggctggagt gcagtgccac aatctcagct cactgcaacc tctgtctccc |
| 18121 | aggttcaagc gattcgcctg cctcagcctc tcgagtatct gggattacag gcgcccacca |
| 18181 | ctatgcctgg ctagtttttg tatttttaat agagacaggg tttcaccatg ttggccaggc |
| 18241 | tggtttcgaa ctcctgccct caggtgatcc acctgcctca gcctcacaaa gtgttgggat |
| 18301 | tacaggcgtg agccactgcg ccctgcaggg aagtgctttg tttttttttg ttttgttttt |
| 18361 | ctttttgttt tttgagacag agtctcactc tgtcacccag gctggagctc agtggcgcga |
| 18421 | tctccactca atgcaagctc cacctcccag gttcacacca ttctcctgcc tcagcttccc |
| 18481 | aagtagctgg gactacaggt gcccgccacc acgcccagct aattttttgt attttttagt |
| 18541 | agagatgggg tttcaccatg tttcccagga tggtctcgat ctcctgacct cgtgatccac |
| 18601 | ccacctcgtc ctcccaaagt gctgggattg caggcgtgag ccacagcgcc tggccaggga |
| 18661 | agtgcttttt aatgccaatt cccttccctt ccttctgccc ctctcatttg gagagtatat |
| 18721 | gtcctgcagc cttttttctc ccgcaaacat actttctcct ccccttctct ggcaggactg |
| 18781 | ggacactgtt gagaggcagg aggaggaggc ccccagctgg gacgagctcg cagtgatgat |
| 18841 | cccgaggagg cctcgggagg ggccgagagc tgacagctcc caaagggctc cgtctctcct |
| 18901 | caccaggtcc cctgtgggag gagatgctgc aggccagaaa aaggagggtg agtccttctg |
| 18961 | ccaggttggt tcccatggtg atggcctggg gccccccaga tagccatctc actggccatt |
| 19021 | tgggactctg ggcacggctt actttggtgg cctgagtgtt aataatagta acagtttgca |
| 19081 | tgtcatgatg gagcagccac aatgagttat gctacccact ttaattatta ttattattat |
| 19141 | ttgggatgga gtcttgctct gttgcccagg ctagagtgca gtggtgtgat ctcggctcac |
| 19201 | tgcaaccttt gcctccccag ttcaagcgat tctcctgccc cagcctccca agtagctaag |
| 19261 | attacaggct cccgccacca tgcccagcta atttttgtct ttttagtaga catggggttt |
| 19321 | caccatgtta gcccagctgg tctcaaactc ccaaccttca gtgatctgcc catcttggcc |
| 19381 | tcctaaattg ccgggattac aggcgtgatt acaggcacgc ctagcctgtt attattatta |
| 19441 | ttattactat tattattttg agataagagt ctcacactgt tgcccagact ggagtgcagt |
| 19501 | ggtgccctct tggctcactg caacctccgc ctcctgggtt caagagattc tcctgcctca |
| 19561 | gcctcctaag tacctgggat tacaggcacc cgccaccaca cgtggctaat ttgtgtattt |
| 19621 | ttagtagaga cagggtttca ccatgttggc cgggcttgtc tcaaattcct ggctggggat |
| 19681 | tacaggagtg agccactatg cctggcctta gccaaggagt ttggacttct ctaaatagta |
| 19741 | gggagccacc gaaggttttt gaggaggaaa gtcatgtaat taaacctgtg cctcaggaag |
| 19801 | ttccctagat caaagatgca aaggatgaat tggagcaggg aggggttgaa ggatgagaaa |
| 19861 | ccagttaaga gactgttgca ggcactgtag caataactgg ttcaggcatg aatcactggc |
| 19921 | ggatgcaaaa tccctagggt gataatttgt cagcaaacag gatagtcatg gtttcaaagt |
| 19981 | attgtgtccg gaattggtgg gttcttggtc tcactgactt caagaatgaa gcggcagacc |
| 20041 | ctcgcgatat tacagttctt aaaggcggcg tgtctggagt ttgttccttc tgatgttcgg |
| 20101 | atgtgtttgg agtttcttcc ttctggtggg ttcgcggtct cgctggctca ggagtgaagc |
| 20161 | tgcagacctt tgtggtgagt gttacggctc ttaaggagac gcgtccgcag ttgttctttc |
| 20221 | ctccctgtgg gttcatggtc tggatggctt caggagtgaa gctgcagacc ttcgtggtga |
| 20281 | gcgttacagc tcataaaggc agtgtggacc caaagagtga gcagcagcaa gatttattgc |
| 20341 | aaagagcgaa agaacaaagc ttccacagca tggaagagga cccgagcggg ttgccagagc |
| 20401 | tggctggggc agcctgcttt tattctcttg tctggcccca cccacatcct gctgattggt |
| 20461 | ccattttaca gagagccgag tggtctgttt tgacagggcg ctgattggtg catttacaat |
| 20521 | ccctgagctt gacacaaagg ttctccacat ccccactaga ttagctagat acagtgtcca |
| 20581 | cacaaaggtt ctccaagtcc ccaacagagt agctagatac agagtgtgga ttggtgcatt |
| 20641 | cacaaaccct gagctagaca cagggtgctg attggtgtgt ttacaaacct tgagctagag |
| 20701 | acagagtgct gattggtgta tttacaatcc cttagctaga cataaaggtt ctccaagttc |
| 20761 | ccactacact caggagccca gctggcttca cccagtggat ctcgttctgg ggctgcaggt |
| 20821 | ggagctgcct gccagtccca tgccatgcgc ccacactcct cagcccttgg gtggttgatg |
| 20881 | ggactgggcg ctgtggagca ggggcggcgc tcatcgggga ggctcgggct gcacaggagc |
| 20941 | ccacggaggc ggggggaagc tcaggcatgg cgggctgcag gtcccgagcc ctgcccggtg |
| 21001 | ggaaggcagc taaggcccgg cgagaaatcc agcgcagcgc tggtgggcgg gcactgctgg |
| 21061 | gggacccagc acaccctccc cagccgctgg cccaggtgct aagcccctca ttgcccgggg |
| 21121 | ccggcagggc cagccggccg ctccgagtgc ggggcccacc aagcccacgc ccacccggaa |
| 21181 | ctccagctgg cccacaagcg ccgcgcgcag cctcggttcc cgctcgcgcc tctccctcca |
| 21241 | cacctccgtg caagctgagg gagccagctc cggcctcggc cagcccagga aggggctccc |
| 21301 | acagtgcagc ggtggcctga agggctcctc aagtgccgcc aaagtgggag cccaggcaga |
| 21361 | ggaggcgccg agagtgagcg agggctgtga gggccgccag catgctgtca cctctcagta |
| 21421 | tcacccctca gattctgcat cgattactga gagaaaggca cccttaggct ggggagagcg |
| 21481 | ggaagatacc actttcacca agaggctgct cagcatcccc agagtggggc aaaccaacat |
| 21541 | aatatgcccc ctgatatgat gcatggggtc aggggagggg atgctggggt gggcacagaa |
| 21601 | tcccttccct tctaaatcgt cctgctgaaa atgcattgcc tacacctaac cccagtgaaa |
| 21661 | catcagacaa acccgaattg aaagacattc tgcaaaatga ctgggctcct cataggacaa |
| 21721 | aaagcggcta ggggactctt cttgattaaa agagactaac aggatgagga cgtggaatgc |
| 21781 | catgtgtgag cccattggga tctgggacag gaggacacag agctgtgaca ggcattactg |
| 21841 | ggacaactgg ggcttgtttt tttttttttt tttttttgag atggagtctt gctctgttcc |
| 21901 | ccaggctgga gtgcagtggc gcgatctcag ctcattgcaa cctccacctc ctgggttcaa |
| 21961 | gcgattctcc tgcctcagtc tcctgagtag ctgggactat aggtgcctgc caccacgccc |
| 22021 | agctgacttt ttgtatttct agtagagaca gggtttcacc atgttgagcc tgatgggatc |
| 22081 | cgggacacgc ctatagtccc agttactcgg gatgctgagg caggaggatc gcttgaactt |
| 22141 | gggaggtgga ggttgccgtg agctgagatc gccccactgc actcccgcct gggcaacaga |
| 22201 | ataagactcc atctcaaata aataaataaa taaataaata aataaataag ggccatggtt |
| 22261 | gtggggtgag gaggggacag agaaggagag aggtttagga ggcagacttg atggtacttt |
| 22321 | ggacaggagg atacacagtc acagctcctg gcctgggtgt ctgggtagat ggtgtgccct |
| 22381 | ttgctgagag caggtggctg gggagcggat gggcccagcg ctggctgtgc tgtgtgggat |
| 22441 | ttgcgagccc tgaggaagag gttttgaggc ttcagatgct cagggaagca ggggatggag |
| 22501 | atgtggcatc ttcaactgag gagcaatgtt cactcaggca ctcagcagac gtttacttac |
| 22561 | tgcccacaag tcaatcatgg ctgaatagat gaggcagcaa tgagaacagc agcagcatta |
| 22621 | cagcagtgac ctgttttttt gatgttccag gccttgtgct aaataaatgt cttgcacaga |
| 22681 | atcactctgg gctccccgat ccctcactcc tggtctgcct ccttcctcac gggccactcc |
| 22741 | acctcgctct cctttgctga ggccgcctcc tctgcttcac ttttaaatat ctgatgcccc |
| 22801 | acatcccagt cctgggcccc ttctgtcttc tccctgcaca cttagctgct tggctttcgg |
| 22861 | tactgtctgg gaaaaaccat gactccggag tccacatctc tggccttgat ttctcccctg |
| 22921 | aacctgccaa tttatacaac ccagccctct actgcgttaa tcacacctca ggccccacac |
| 22981 | tgcactcact gtttcactca tccccccccg cccttttttt tttttttttt tttttttttg |
| 23041 | agacagagtt tcactcttgt tgcccaggct ggagtacaat ggcgcagtct cggctcactg |
| 23101 | caacctccac ctcccaggtt gaagccattc tcctgcctca ggctcccaag tagctgggat |
| 23161 | tacaggcatg caccaccacg cccggctaat tttgtatttt tagtagagac ggggtttctc |
| 23221 | catgttggtc aggctggtct cgaactcccg acctcaggtg atccgctgat ccgcctgcct |
| 23281 | cggcttccca aagtgctggg attacaggcg tgagtgaccg tgcccggccc actgctacaa |
| 23341 | tactattaac taagctacag acgtgatggg attcaccagt ttttctacta atatcctttt |
| 23401 | tctgttccag gatccattcc aggatcccac attgccttta gtccctctcc tcatctcctc |
| 23461 | cgtctcctcc aatctgtgac aggtttccca tctcttccag tttcccctga aggctggggg |
| 23521 | cacagcgatc tgctcacctt tgactttaaa aaaagtctcc ctggatgaac aatgacattg |
| 23581 | gccccagagt gcccaggctt gggggctact gcaaccatcc aggagagaaa tagtggtggc |
| 23641 | ttggagtagg aagtgggtgt agatgagaga aacaggtgaa tatggaatgt atttatttta |
| 23701 | tttttcgtag agatgggggc tcactatgtt gcccaggctg gtctccaact cctgggctca |
| 23761 | agcaatcctc ctgcctcagc ctcccgaaat gttggaatta caggtgtgag ccactaccag |
| 23821 | gcatgaaacg tattttagaa tgccatggga catcagccac cagcaatttt ttttgttttt |
| 23881 | tgttttctga gacagagtct cgctctgtca cccaggctgg agtgcagtgg ccagatctca |
| 23941 | gctcactgca acctccacct cccgggttca agcaattctc cagcctctgc ctcccgagta |
| 24001 | gctgggatta caggcatgca ctactgcatc cggctaattt tttttttttt tttttgtatt |
| 24061 | tttagtagag atggggtttc accgtgttag cagggctggt atcgatctcc tgaccttgtg |
| 24121 | atccgcccgc ctcggcctcc caaagtgctg ggattacagg catcagccac tgctcccggc |
| 24181 | tgcatccagc taatttttgt atttttagta gagactggtt tcaccatgtt ggccaggctg |
| 24241 | gtctcgaact cctgacctca gatgatccac ccgccttggc ctcccaaagt gttagcatta |
| 24301 | caggcgtgag ccaccgtgcc tggcaacctt gcaaattttg aattccctgc taggtgctgg |
| 24361 | gaactcagac tttcaccaac accagcccag agaggctgga cgaggcagtg gctgcaaagg |
| 24421 | gagaggacag gggatcttaa gaaggcgtga agggagggga tctgcatgaa ggcaactgtg |
| 24481 | gctacttttt tgtttcgttt tttgttttaa gacaatgtct tgctctgttg cccatgctgg |
| 24541 | agggcaatgg cacattcttg gctcactgca acctccacct cctgggctca ggcactcctc |
| 24601 | cggcctcagc ctcctaggta gctgggacta caggcacgta ccaccaggcc ctgctaagtt |
| 24661 | ttaaaaaact tgtagtagag acagggtctc gccatgttgc ctaggctggt ctggaactcc |
| 24721 | tgagctcgag tgatcctccc accttggcct ctcaaagtgc tgggattaca ggtgtaagcc |
| 24781 | accacaccca tagttgtggc tcctttaaga tgaggccatg atacccttta ctcttcacct |
| 24841 | aaagcagtag ccaagggaca tgtacatagg ggtgctcaac acctgcttgg tgaccgaggg |
| 24901 | attgagcggg gtggagggtg acacaccaag gtcatggcaa ctctgtcatg aggctaggag |
| 24961 | ttgcaaagag ggtcactact gaggacagtt acattaatcc tttaggccag tgcttctgaa |
| 25021 | actataaggt gtacaaatca ccagacagtt ttgttaaatg cagatccaga agcagtgcat |
| 25081 | ctgggctggg acctgagatt ctgcatttct ggcaaactcc cagctaccag tttataaaag |
| 25141 | gttgtccatc cctgcacctt tcctatcctc atggcagccc taggagaagc ctcagggtag |
| 25201 | gaacatttgg atacaaaaaa acaggggctt tctagagctg tcgcacagga aacaggctca |
| 25261 | ttagaacctg tctctactaa aaacacaaaa atgagctggg catagtggtg catgcctgta |
| 25321 | atcccaacta cttgggaggc tgaggcagga gaatcatttg aacccaggag gcttaggttg |
| 25381 | cggtgagccg agatcgcgtc attgcactct agcctgggtg acagaacgag actctgtctc |
| 25441 | aaaaaaaaaa aaaaaaaggt cgggcatggt ggctcacgcc tgtaatccca gcactttggg |
| 25501 | aggccgaggt gagcggatca cctgaggtca ggagttcgag accagcctgg ccaacatggt |
| 25561 | gaaaccccgt ctctactaaa aatacaaaaa ttagctgggc atggtggcgc atgcctgtaa |
| 25621 | tcccagctac tcgggaggct gaggcaggag aatggcttga acctgggagg cggaggttgc |
| 25681 | catgagccga gatcacgcca ctgcactcca gcctgggcga cagagcgaga ctctgactca |
| 25741 | aaaacaaaac aaaacaagaa atggggggaa ttccttggat tctgattgaa ggaaatagaa |
| 25801 | ctgggaaggg aagactgtca ggtggctgct gttgggccca cctctccctc cctggggtca |
| 25861 | cacaggccat tgtcaacact tctctccaca aatttgcttc ttctctgtct tgtccgtgga |
| 25921 | tccccagacc ctgtggcctt ccagttcttg aacccatctc ttgagtgagt cagggtctca |
| 25981 | atttcaaatt cttgacctca gcttgagaga ggcatccaag cccttgtcta atcagccttg |
| 26041 | gtcagagagg tggagtcact tggtacagac agtgagacct gtaggaggag ggtgtggggt |
| 26101 | ttgccctaat cactggtcct aagggacaaa gaaaggtaga atatgagagc tgcctggacc |
| 26161 | tctcccctta ccttgagccc ctctcttctc tctccagaca ccggcggtgg gggccggagc |
| 26221 | gcaggacagc actgggcaag gctccgggga gaaagcgggt tgtccctgga gcggcaccgg |
| 26281 | tcaacactga cccaggcttc ctccatgaca ccacacagtg gacctcgaag caccacgtct |
| 26341 | caggcttctc ctgcccaaag ggacactgct caggctgcct ctacacgtga aatccccaga |
| 26401 | gcctcctctc cccatcgaat cacccaaagg gacacctcca gggcctcatc cacccaacag |
| 26461 | gaaatctcca gggcctcatc cacccaacag gaaacctcca gggcctcatc cacccaagag |
| 26521 | gacaccccta gggcctcatc cacccaagag gacaccccca gggcctcatc tacacagtgg |
| 26581 | aacaccccca gagcttcctc tccctcacga agcacccaac tggataaccc cagaacctct |
| 26641 | tctacccagc aggacaaccc ccaaacttct tttcctactt gtactcccca gcgggaaaac |
| 26701 | cccaggacac cctgtgtcca gcaggacgat cccagagcct cctctcccaa cagaaccact |
| 26761 | caacgagaga attccagaac atcctgtgcc cagcgggaca atcccaaagc ctccagaacc |
| 26821 | tcctctccca atagagccac acgagacaac cccagaacat cctgcgccca gcgggacaat |
| 26881 | cccagagcct cctctcccag tagagctaca cgagacaacc ccacaacatc ctgtgcccag |
| 26941 | cgggacaatc ccagagcctc cagaacctcc tctcccaata gagccacacg agacaacccc |
| 27001 | agaacatcct gtgcccagcg ggacaatccc agagcctcct ctcccagtag agctacacga |
| 27061 | gacaacccca caacatcctg tgcccagcgg gacaatccca gagcctccag aacctcctct |
| 27121 | cccaatagag ccacacgaga caaccccaga acatcctgcg cccagcggga caatcccaga |
| 27181 | gcctcctctc ccaatagagc tgcacgagac aaccccacaa catcctgtgc ccagcgggac |
| 27241 | aatcccagag cctccagaac ctcctctccc aatagagcca cacgagacaa ccccagaaca |
| 27301 | tcctgtgccc agcgggacaa tcccagagcc tcctctccca atagagctac acgagacaac |
| 27361 | cccacaacat cctgtgccca gcgggacaat cccagagcct ccagaacctc ctctcccaat |
| 27421 | agagccacac gagataaccc cagaacatcc tgtgcccagc gggacaatcc cagagcctcc |
| 27481 | tctcccaaca gaaccaccca acaagacagc cccagaacat cctgtgcccg acgggacgat |
| 27541 | cccagagcct cctctcctaa cagaaccatc caacaagaga accccagaac atcctgtgcc |
| 27601 | ctacgggaca atcccagagc ctcctctccc agcagaacca tccaacaaga gaaccccaga |
| 27661 | acatcctgtg cccaacggga cgatcccaga gcctcctctc ctaacagaac cacccaacaa |
| 27721 | gagaacccca gaacatcctg tgcccgacgg gacaatccca gagcctcctc tcgcaacaga |
| 27781 | accatccagc gagacaaccc cagaacatcc tgtgcccagc gggacaatcc cagagcctcc |
| 27841 | tctcctaaca gaaccatcca acaagagaac ctcagaacat cctgtacccg acaggacaat |
| 27901 | cccaggacct cctctcccaa tagagccaca cgagacaacc ccagaacatc ctgtgcccag |
| 27961 | cgggacaatc tcagagcctc ctctcccatc agagccaccc aacaggacaa ccccagaact |
| 28021 | tgtattcaac agaacatccc cagatcatct tctacccaac aagacaaccc taaaacctct |
| 28081 | tgtaccaaac gagataacct cagacccact tgtacacagc gggaccgcac acagtccttt |
| 28141 | tcctttcaac gagacaaccc tggaacctcc tcatctcaat gctgcaccca aaaggagaat |
| 28201 | ctgagaccat catctcccca ccgctccact caatggaaca atcccaggaa ttcatctccc |
| 28261 | catcgtacta acaaagacat cccctgggcc tcgtttcccc tccggccaac tcagagtgat |
| 28321 | ggtccccgaa cctcttcccc atctcgctcc aagcaaagcg aggttccctg ggcatccatc |
| 28381 | gccctccggc caacccaagg tgacaggcct cagacatcct ctcccagcag gccagcccag |
| 28441 | catgacccac cccagtcctc ctttggcccc acccagtaca acttgccatc ccgggccacc |
| 28501 | tcttcctccc ataacccagg ccaccagagc acctcccgaa cttcctcacc tgtgtacccc |
| 28561 | gctgcctatg gggctcccct gacctctcct gagccctccc agcctccatg tgctgtgtgc |
| 28621 | attgggcacc gggatgcccc tcgagcctct tcgccccctc gctatttgca gcacgacccc |
| 28681 | ttccccttct tcccagagcc ccgcgcccct gagagtgaac cgccccacca cgagcctccc |
| 28741 | tatataccac ctgctgtgtg cattggacac cgagatgccc cccgggcgtc ctcgcccccc |
| 28801 | cgccacaccc aatttgaccc cttccccttc ctcccagaca catcagatgc cgagcatcag |
| 28861 | tgtcagtccc cccaacacga gccccttcag ctccctgcac ctgtgtgtat tgggtaccga |
| 28921 | gatgcacccc gggcctcctc cccaccacgc caggccccag agccttccct cttattccag |
| 28981 | gacctcccca gggccagcac agagagcctt gtcccttcca tggactctct gcacgagtgc |
| 29041 | ccccacatcc ccacccctgt gtgcattggg caccgggatg caccctcctt ctcatcccca |
| 29101 | ccacgccagg ctcctgagcc atccctcttc ttccaggatc cccctggaac tagtatggag |
| 29161 | agcctggccc cctccactga ctctctgcat ggctccccag tgctgatccc ccaagtgtgc |
| 29221 | atcgggcacc gggatgcacc ccgagcctcc tccccacccc gccacccacc cagtgaccta |
| 29281 | gcgttcctgg caccctcacc ttcaccgggc agctctgggg gctcccgggg ctcagcgcct |
| 29341 | cccggggaga ccaggcacaa cttggagcgg gaggagtaca ctgtgctggc cgacctgccc |
| 29401 | ccacccagga ggctggccca gagacagcca gggccccagg cgcagtgcag cagcgggggc |
| 29461 | cgcacccaca gccctggccg tgcagaggtg gagcgcctct tcgggcaaga gcgcaggtga |
| 29521 | gcccgggggt ggggtcagcc aggtgggctg gggaggaggc tcggcagcag gacaggtgaa |
| 29581 | gggttagggt gccaaaagaa agtgttcaaa tccccctggc ttgccattta ccggctgtgt |
| 29641 | gaccttgggc aaatcgctcc atttctctgt ttctgcatat tgggagtttt ctgttttgtg |
| 29701 | tgtgtgtgtg gttaagtgat gtcatgcaca gcccagtggt taacagcaaa gactgcagtc |
| 29761 | aggagggctg agtccaaatc ctgggtcaaa gccacatgtc aactcgtatg acctgatata |
| 29821 | gtgagttaac ctacctgagc ctcagtttcc tcatctgtaa gggaggggaa catgagcaca |
| 29881 | ttcattcaaa taagggtgaa ctgtcttttt attttttatt ttttgttttt ttttttgagg |
| 29941 | tggagttttg ctcttgttgc ccaggccgga gcgcaatggt gcaatctcgg ctcactgcaa |
| 30001 | cctccacctc ctgggttcaa gcgattctcc tgcctcagcc tcccgagtag ctgggattac |
| 30061 | aggcacgtgc caccacaccc ggctaatttt tttgtatttt tactagagac ggggtttcgc |
| 30121 | catattggcc aggctggtct cgaactcctg acctcaagtg atccacccgc ctcggcctcg |
| 30181 | caaagtgcta ggattacagg agtgagccac cgtgcccggc caaaatgaga gtgaactctc |
| 30241 | aaaccctttg atccagactc atgggttttt tttttttttc ttccgtgcat gagggagaag |
| 30301 | aagaaagtac ccatgatttt ttcctgcctt ggcaaagaaa actcatgggt ccctatgcat |
| 30361 | ttcagaaaac agttatgtca atttaaaatg tatggccagg gccgggcacg gtggctcatg |
| 30421 | cctgtaatcc cagcacttgg ggaggccgag gcgggcggat cacaaggtca ggagatcgac |
| 30481 | agcagcctgg ctaacacggt gaaaccccat ctctactaaa aatacaaaaa attagctggg |
| 30541 | catggtggcg ggcgcctgta gtcccagcaa ctcgggaggc tgaggcagga gaattgcttg |
| 30601 | aacctgggag gcggagcttg cagtgagccg agatcgtacc actgcactcc aacctgggtg |
| 30661 | acagagtgag actccatcta aaaataaaaa taaaataaaa atgtatggcc agagctacct |
| 30721 | attttaagaa agaaagctca cagaattatg gatttttagc agtcaaacat cctgggacac |
| 30781 | ctgaagtcca ggtgtctttt gagtctcctt ggtcagcagc actggccccc tggaagggga |
| 30841 | gcatttcctc ctgatcaggc tgaggtttct ctccccagaa gttccagccc tcgagttttc |
| 30901 | aagaatcaga gctagaattc cattagttag ggtcaagaga acaacagcaa caaaaagcag |
| 30961 | tctggaagtc tcaaaacttt ccatgtatat aattcaacga atttttagtt tatttaccaa |
| 31021 | gttgtccaac cattgccaca atctaacttt agaacatttt catcacccta aagggtatgg |
| 31081 | aatattttgt atctaaaatt cctctttgct gctccttggg aaagttttct cctggatttg |
| 31141 | aatctgcatg agaaacctta tcagtcttgg ctgggtgcag tggctccctc ctgtaatccc |
| 31201 | agcactggag cttgcagtga gccaagatca tgccactaca ctccagcctg ggtgacagag |
| 31261 | tgagactccg tctcaaaaaa aaaaaaaaaa aaaaaaatta gccgggcata gtggcacacg |
| 31321 | cctgtagtcc cagctactca ggaggctgag gcagcagtat tgcctgaatt tgggaggtgg |
| 31381 | agtttgcagt gagctgagat tgcgtcattg cactccagcc tgggcaacaa gagtgaaact |
| 31441 | ccatctcaaa aaaagaaaaa aaagaaactt tatctcttgt tcttcaaatt tccttttcca |
| 31501 | gtaagcttga tcatttaata tccagatgac aaccgtgtgg tctccagcat tagtataatt |
| 31561 | ctttctttgg ccttaaaaac aaaaacccag agcagtttta ggtttacagc aaaattgagc |
| 31621 | agaaagtgca gtgttccatg cacagcctct cccactacca atatcctgta ctagataggt |
| 31681 | atgcttgttt ccagctcctg gcctcaaggg atcctccttt cttggcctct caaagtgctg |
| 31741 | gtgagccact gtactgggca gtagggtgat acatttgtta caatccatga acctacacta |
| 31801 | tgaaatcacc caaagtttag ggttcactct tggtgatgta cagcctatag gcttgaatga |
| 31861 | atgtatgaca agtatccacc attgtaacat catggagtag tttcaccctg aaagtcttca |
| 31921 | gtgtctttaa cttttttttt tgtttggaga tggagtctcg ctctgtcacc caggctggag |
| 31981 | tgcagtagtg caatcttggc tcactgcaac ctctgccttc tgggttcaag cagttctcct |
| 32041 | gcctcagcct cccgaggagc tgggactaca ggagcatgcc gccacatccg gctaattttt |
| 32101 | ttgtattttt agtagcgaca gggtttcacc ctgttgccca ggctagtctt gaactcctga |
| 32161 | gctcaggcaa tctacccacc tcggcctccc aaagtgctgg gattataggc gtgagccacc |
| 32221 | gtgcctggtc tgaccttttt tttttttgaa acagggtctt gctttgtcac ccagcagtag |
| 32281 | tgcagtggcg tgatcatggc tcactgcggc ctcaaactgc caggctcaag cgattctctc |
| 32341 | acctcagcct cctcagtagc tgggactaca ggcgtgtacc actataccca gctaattttt |
| 32401 | ctactttttg tagagatgga gtctcacttt gttgcccagg ttggtctcaa actcctggcc |
| 32461 | tcaagcaatg ctcccacctt ggcctcccaa agtgtctttg acctttttat gattactatt |
| 32521 | tcttgtctaa tgtcaatttt cctaactttg tcttaactaa taactcagca gggacattaa |
| 32581 | ggtctttaag ccaaagttaa ttaattttct ttcctttttt ccaggataat ttcagagaga |
| 32641 | taaggtgttt atattaataa tagaaatgag aaatatgttt acacttttat taaccatttg |
| 32701 | tttttacacg atcactccta tacatttaat tctactctct ttgaaatagc ttatttacct |
| 32761 | tttagggaag ttttcataat tttactgaat aattaaaatt tttcctctta tctggcacct |
| 32821 | tttccaagta gaaaaccatt catcctctga atatggaaaa ttttaaaact gtgcagtgtg |
| 32881 | tgtgtaaggg acagactgga gcttatgagc gggtggctgt aggagtgtgc ttttattttc |
| 32941 | tcctatttcc tcatcgatat gtatttattg agcatctact ctgtccaagc attgtcccga |
| 33001 | gtctggaaaa tttttcttaa agggttgtca catcaaagca ttgggagttt tggcttgatc |
| 33061 | ttaatttttt tttccttaga tgcctttggc atctcttaga gtcacgtagc atcctgtggt |
| 33121 | catttgaatt caaaacctag ccttcactgg atttgctaga cttgatggct ttgctccttt |
| 33181 | aattctctct ggaggtcgaa gaacccatct aagcttccga aggaaacgtt tcctttgtca |
| 33241 | tgcttggtgc ggccacatca accctcggga acaggtggcc ccgaggagac gctgttgctt |
| 33301 | cagcatcgga caagccaggt ctctgttggg gtttcagaat cttcttgagt ccctcactct |
| 33361 | tttctctcag ttctacatgg gggaaaaaag gaaggcgagt tctcaggagg aatgctcatc |
| 33421 | aagcaagctg gagttcgtat ggaaaatgca tccatccgga agagaacaca caagtgcctt |
| 33481 | gcttccctgc accgggtgtt tccactattg tcctcctggt cctccccatt agggaggaac |
| 33541 | agcccactgg gtcacgtctg ggctcttgct tcatcgaagc tcctataccc cagttcgggg |
| 33601 | gaaaattcac tctaaggcct tcagctctca cagagtaagg aaacgcactc acctccaatt |
| 33661 | agattacaaa ttggctgggt gcagtggctc atgcttgtaa tgccaagact ttgggaggtc |
| 33721 | aaggcaggtg gattacctga ggtcaggagt tcaaaatgag accagcctgg ccaacatggt |
| 33781 | gaaaccccgt ctctactaaa aatataaaaa ttagctgggc atggtggtgg acacctgtaa |
| 33841 | tcccagctgc tcagcaggct gaggcaggaa aatcacttaa aaccagaagg cggaggttgc |
| 33901 | agtgagctga gattgcacca ctgcactcca gcctgggtga cagagcgaga ctccatctca |
| 33961 | aaaaaaaaaa aaaaaaaaaa gttacaaaca gcctgcccag ggagccctca agctcagaaa |
| 34021 | cacttcctcc agggaacttt ggttcctctc cgaaccagct gccaataact gctaacaact |
| 34081 | aacattattg tgctttatgg ctctgattct aatgacattg gcaaaagaca tgaaacaaca |
| 34141 | aaaaactcca accccatact ttttttttga gacaggatct tgctctttca cccaggctgg |
| 34201 | aatgcagtgg catgatcatg gctcactgca gcctcaacct cccaggctga agcgatcctc |
| 34261 | ccacctcagc ttcccaagta gctgggacta cagccacgta ccaccatgct cggctcatta |
| 34321 | aaaaaatttt tttttcctag aacaaggtct cattctgttg ccagggctgt ctcaaactcc |
| 34381 | tcgactcaag tgatcctctg acctcagcct ccccaagtgc tggaattaca ggtgtaaaga |
| 34441 | cactgtacct ggcctcccaa ccccatatat atatatatat attttttgag acagggtctc |
| 34501 | actatgtcac ccaggctgga gtgcagtggc gcgatctcag ctcactgcaa cctccacctc |
| 34561 | ctggggtcaa gcgatcctcc tgcctcagcc tcctgagtag ctgggattac aggcacgtgc |
| 34621 | caccacgcct ggctaagttt tgtattttta gtagagattg ggtttcacta tgttgaccag |
| 34681 | gctggtctcg aactcctgac ctcaagtgat ccacccacct cagcctccca aagtgctgtg |
| 34741 | attagaggca tgagccacca cacctgggct aatttttgta tttttagaga ctaggtttca |
| 34801 | ctatgttgtc taggctggtc ttgaactcct gagctcaagc catccgcctg cctcagcctc |
| 34861 | ccaaagttct gggattacag gcgtgaccca ttgcgccctg cccaatccca tacttttgaa |
| 34921 | ggtgtcgttc cagcatggct cctcaggcac aggcccacca cagacagcag ggcctatgga |
| 34981 | ggcctgagca gagtttcctc atacttccct ttttgctgcc tcactctggg tccaccacag |
| 35041 | ggtggccttt ttcaggcttc tcttcctggt tcagttcatc gaccaaagac atggctccat |
| 35101 | ttgctaactg agacccaacc aaaataaaca ttcatggagt ggttgggcct tttgttgtga |
| 35161 | ccccttaggt agaggaaggg agagatatgc ccaggttctg tttggtgttt ctacctgtca |
| 35221 | atagagatac cacgttaatc attaacagcc atgcctccca gttagtaagc aagacaacta |
| 35281 | actggaacta gactttttac acaagttaga gatgatcttc atcggatgcg tcaacaatgc |
| 35341 | ctgaagccca gtgtcttaga aacaacactt gcccagggtc aggcgtggtg gctcatgcct |
| 35401 | gtaatcccag ctacttggga gattaaggca gagaatcact tgaacccggg agatggaagt |
| 35461 | tgcagtgagc cgagatcgcg ccactgcact ccagcctggg tgacagagcg agactccatc |
| 35521 | tcaaaaaaaa aaaaaaaaaa aagacacttg cttggacagt ttatgttggc ctctctgaag |
| 35581 | ttgtcaggga gaatgtttct ttcttctgat cttgctcaga gctcttttgc caacagctag |
| 35641 | gatggcctgg agttttcaag gctaagcgct gggattctgt tggttaacag tgatgggagg |
| 35701 | gaaaaaggaa aagaaatcca aaatttacaa tatggacagg aaaaggcaga aagaatggaa |
| 35761 | cacgggggca cacagcagtc tggctctgtc gtcccacctc gtgggctgcg atcatgatac |
| 35821 | aagtgcttgg cccctggaac ataagaagca ctcaataaat gctttgtcat aatgattatg |
| 35881 | tgtgcccagt gcctggtaca cagtaggtgc tcaataaatc ttaattcccg caaagaccag |
| 35941 | tctaaccttt gtctgggggt ggctcttggg ctgctggtgg ggtggtggtt agtcatagga |
| 36001 | agtactggat gagacaggag agggccatgg ccagggccag atccccctcc ccacccaacc |
| 36061 | gcctctactc cccacttttc tcgtcatgtt cgcaagagcc tcatgaggca gaatagagca |
| 36121 | gtgttaacca tccccatttt tcagaagggg aaactaaggc cctgagagtc atcctcactt |
| 36181 | agggcccttc aacgagcttg cagtgggtcc ctggctgtcc cacatctcct cctgttggag |
| 36241 | gtgggagcag aggggctggg gtgctgggag tgggacagtc cctcagagga gtggctgcat |
| 36301 | ttgctcatag gaagtccgag gcagcggggg ccttccaggc ccaggacgag ggacggtcac |
| 36361 | agcagcccag ccaaggccag agccaacttc tccgaagaca gtccagccct gcccccagca |
| 36421 | ggcaggtgag cactgccagc tgtctggggc cccgcacccc aaggggcggc cactgcctct |
| 36481 | tccctcccgc tagaagccag gcagggggct tggacaggaa ggtcctctat gaaagggtcg |
| 36541 | gagtccaatc atggggatcc agctctcccc tctccccaac ggccagcagc tcttggcaaa |
| 36601 | atgcacaaga ccccacatta atcctttgaa gatagcccct ctcccacgct atccccttcc |
| 36661 | tttactaagc actgctgtct tttttttttt tttttttttt tgagatggag tcttgcactg |
| 36721 | tctcccaggc tggagtgcag tgggacaata ttggctcact gcaacctctg cctcccaggt |
| 36781 | tcaagtgatt cttctacctc agcctcccaa atagctggga ttacaggcgt gtgccaccac |
| 36841 | acccaactaa ttttcgtact tttagtagag acagggtttc accatgttgg ccaggctggt |
| 36901 | cactcctgac gtcaagtgat ccgcccacct tggcctccca aggtgctggg attacaggcg |
| 36961 | tgaaccacgg cacctggcca atactgctgt cttgagcaga tttcagggaa agccttgaag |
| 37021 | caagaatctg gctctaaggg ccctctcttt cagggtaatt tgtatcttta accaaaccca |
| 37081 | gagggctagg cccgcctcag tggaatgggg tattggtggt ggaggttctg gcacctgata |
| 37141 | gcccaagttg gaatcagtat ctttgagagg ggtgagaagc caagaacggg ggcaggtctt |
| 37201 | tgcagatctt tttctggaac tgaggaaagc gggtgaaagg gaggagctga ccccggaggg |
| 37261 | gtggggcaga gaccctgtgt actttttggc ctgctttgat tcaggctgct gtgtggacac |
| 37321 | agccttgact ctctgggggc ctaagaaagg cagagctggc agccaggtcc ccagagagag |
| 37381 | agcctcacct accccctcac ctcatcccca ggtgaccatg ctccctgcca aacaggcaga |
| 37441 | actgacccgg cggagccaag cagagccccc tcatccttgg agtcctgaga agagacctga |
| 37501 | gggagatcgg cagctccagg ggtccccgct gccccccagg acatcagcca ggacccctga |
| 37561 | gagggagctg cggacacaga gacctctgga gagtggccaa gcaggcccaa gacagcctct |
| 37621 | gggggtgtgg cagagtcagg aggaaccgcc agggtcccag ggccctcata gacacctaga |
| 37681 | aaggagctgg agcagccagg agggaggcct gggccctggg ggctggtggg gatgtggaga |
| 37741 | gcccagcctg ggggcagcca aagccccgga gggagcatgg gggggcactt ccagggagta |
| 37801 | caaggagagc tgggggcagc cagaggcctg ggaggagaag cccactcatg agctccccag |
| 37861 | agaactagga aagagaagcc cactcacgag cccccctgag aactggggag gccccgcaga |
| 37921 | gtcctcacaa tcctggcact ctgggacacc cactgctgtg ggctgggggg cagagggagc |
| 37981 | gtgtccatac ccgcgtggct ctgagaggcg acccgagctt gactggaggg atctgcttgg |
| 38041 | ccttctccgg gcaccaggag agggggtctg ggcccgtgtc cccagcctgg actgggaggg |
| 38101 | cctcttggag ctcctgcagg ccaggctgcc ccgcaaggac ccagctggac acagggatga |
| 38161 | cctggccagg gctttagggc cagagctggg tcccccaggc acaaacgatg tccctgagca |
| 38221 | ggagtcacac agccagccag aaggctgggc cgaggccacc ccagtcaatg gacacagccc |
| 38281 | cgcactgcag tcccagagcc cggtccagct gcccagccct gcctgcacct ccacccagtg |
| 38341 | gccaaagatc aaagtgacaa gaggaccagc gaccgcaact ctggcaggcc tggagcagac |
| 38401 | gggccccctg gggagcagga gcactgcgaa gggccccagc ttgccagagc tgcaggtaag |
| 38461 | gaggtttcca ccctcccaag ggtagccaga aagtcagccc cactcagcca agtctccttg |
| 38521 | gaaaagcctc cccttggagt agcctaagct cctgcatccc cctccaggct cagacctcag |
| 38581 | cctccctgct gaccacaacc catcccgatc accaaactgg cccaacaatg atgatgagca |
| 38641 | acacagtttt aagcgtttat gggccaagcc ctgatctgaa tgtttgacgt gtgcttttcc |
| 38701 | catttagtct ccttagcaac caggtgagaa atacactatt tacagataag gaaactgatg |
| 38761 | cgcagggtga agccacttgc tggtggggca tgggcaaaac ccaggtctgc tcagtgcaga |
| 38821 | ccacactgag gcctcaagca agatgctctg gccagggcct attcccctcc tggctccacc |
| 38881 | atacctggtt tatgttgtgt ctggtggcac acacctgacc ccacctggga ctgtagccag |
| 38941 | tgtgggcatg ccccttcccc tggtggtact caggtacctg agtccaggac agcctcgctt |
| 39001 | accctctctg gcccctacag ctcctctcag acacagagaa gagggtgcat caatgctcac |
| 39061 | tgggttcagc tagctgccaa gacaggctgc ttaaatgagg gtcgtgtgca aagtgggccc |
| 39121 | agcgccgggc acacagtagg tgctcgccct tcccctgctt cactggtgct ttggtgctgc |
| 39181 | cttgaagccc agaacattct tcatctgaag atggtgggca gggagggtct tggaggccag |
| 39241 | aatcctgcac cctggcaata gctcattggg aggacggcat gtggttttga acaccagcct |
| 39301 | ctctctctct ctgtaagatg gaccaaccac ttctctgacg ggcagcgctg gggtgccgtg |
| 39361 | ggggttcctg cttgtttctc caaagcctcc tcatctccta gatgcaaagt ccaacgccac |
| 39421 | ctgccccagg atgagcaggg cttccaggca tcagggtgca ccccgtgctg ggcccagggc |
| 39481 | cttgccatat gtgcctcaag tggataggag gcagctgcca cttgacagat ggggaaactg |
| 39541 | aggctcagac tccttaggca tttgctgggg gtcacacatg cataggtcgt gagaaatgag |
| 39601 | atcaaagcat ccactccaaa gtttgtgctt ttatttttat ttatttattt acttattgag |
| 39661 | acggagtttc gctcttgttg cccagactgg agtgcaattg cacaatctca gctcactgca |
| 39721 | acctccgccc cccaggttca agctattctc ctgcctcagc ctcccgagta gctgggatta |
| 39781 | caggcatgtg ccaccatgcc cggctaattt tgtgttttta gtagagatgg ggtttctcca |
| 39841 | tgttggtcag gctggtcttg gactcctgac ttcaggtgat gcatccacct tggcctccca |
| 39901 | aagtgccggg attacaggtg cgagccacca tgcccggcct aagtctgtgc ttttagccac |
| 39961 | cacgtcacaa agctcctgag cccatgggag gactggagaa ccctctcccc tgtatttccc |
| 40021 | tgtggctttg atgagttgac cctccaatca actcaatgcg tggacatcag agaagcaggg |
| 40081 | ataagtcagc tcgtcctgcc ctcagattgc tgtcaggctt gttaggaagg cacacagaca |
| 40141 | gctcaaggag gacacggtgc tgtgtcccgg ggcatgctgg gtgccacagg ccggccaggt |
| 40201 | caagaaggaa gttagaaaga ttcttcagtt tcatggtgaa gctcagggtt ctcaggaggc |
| 40261 | taggagatgg tggctgggaa gggatgggag caccatgtac tgaaaggaat ttcacagatg |
| 40321 | acaaaacgag taaccaccag gtcctgctgg ggctccagct gctcctctct atgaaaatcc |
| 40381 | ttggcttggc acagctgggt gcagtggctc acatctgtaa tcccagcact ttgggaggct |
| 40441 | gaggcaggca aatcacgagc tcaggagatc gacaccagcc tggctaacac ggtggaaccc |
| 40501 | cgtctctact aaaaatacaa aaaattagcc gggcgtggtg gcgggtgcct gtagtcccag |
| 40561 | ctacttggga ggctaagaca ggagaatggt gtgaacccgg gaggtggaag ttgcagtgag |
| 40621 | ccgagatcac gccactgcac tccagcctgg gtgacagagc gagactccat ctcaaaaaaa |
| 40681 | aaaaaaaaaa aaatccttgg catggcactc aaggccggct tcccttcctt ccactccgga |
| 40741 | tttgcctcat tggtgctgag ctggctgcag ggcctgtgag cacatatccc tgcctttgca |
| 40801 | catgctcttc cctgttcagc caccaaacgc ctgttcattg tcgaagtctt aggtcaggct |
| 40861 | ccctgtcctg agaagccttc cctgaacagt cactcctagt aatggtcccc ttctgggctt |
| 40921 | ggcagttttg cttccatttg tccatgcaac atccatctaa tagggttgtc atttccccat |
| 40981 | aagctccaca caggcaggat ctctacctgc tttatctctg taactctagc tctggcccag |
| 41041 | ggcctgacat aaaggagggg acagctcagt ggatgcatgc aagatggagg acacaggggt |
| 41101 | cagtgggtga acaatgaatg aatggagggt gaatgtgtga atggatgatg gatcaatgat |
| 41161 | gcatgttgaa tgaataatag acatcttttg gatggatgac agatgggtga tgatggatgg |
| 41221 | atagctgggt gatgaatata tggtggtggt ggatatatga tggatgttgc ttaggtgatg |
| 41281 | gatggatgaa ctttgggtgg aatatgaatg gatagatgtg gcatgggtgg atgaatgtca |
| 41341 | gatgatagat gttggagata tgggtagatg gatgatggat ggagagaggg atatgtaggt |
| 41401 | attgggtaaa tggatatgtg atggatcaat ggagggtaga tacatgaatg ggtgatagac |
| 41461 | aatggatgat gggtacatga gagggtgagt catgtgatag acactggatg gttggatgga |
| 41521 | tacatggatc tactgatgct ggacgttaga tgggtgttgc atggacagat gatagaatgg |
| 41581 | atggatgagg tggacagatg catgcatcct ggagaataag ttgggctaag ctgtgttctt |
| 41641 | tttttaatct ccagttccaa ccagaggagc ctgaggagtc agaaccaagc agaggccaag |
| 41701 | accccctgac tgaccagaag caggcagact cggtagctgg gtcatgggtg tgggtacata |
| 41761 | cggtggggaa gggaggggga agcaggttgg agatgggctt cattcctcag aagagcccta |
| 41821 | gaatcaacca gaccaaagtt ggcattgcca tggggtcatc tatgtgcatg gtggggcctt |
| 41881 | aagaagaggg gctctgcagg agccaccttc tggcttgggg acctgggtag gtgggcgatc |
| 41941 | ctggggtcag aaccctaggc catgcttctc atttgctggg actgaaaagg tcaatgtctt |
| 42001 | tccctgcgca aatgatggtt tggccccagt ggtctctgtg ggaagagatc cttccggttt |
| 42061 | gaaagggcca ggccaggctg aaagagcagg gcttccacga gcaggagcca gagagctgag |
| 42121 | gatgtaccca gtcagccagg cctggagggt ctccagggtc ctggaggcgg gagagatatg |
| 42181 | tgcgggggtg ggacccacgg atgctgctct gaggcctggc tgcagctggt gagcacaact |
| 42241 | ctgcccgccc ctccccgtga cctaccaaac agactgttct cgtcaccctc agcctccaga |
| 42301 | gaggtgagat cagagttgag ggccgtgggg cagtgggagg tgggggagga ggagacagac |
| 42361 | tgtttggggc tgtgttttcc ggtcctgctc ttcctcccgt tgcctcctga agccaggggt |
| 42421 | ggcagggagc gtccattggg cagcatagcg ccccccaagt agggccctgc cgtgagtcaa |
| 42481 | agctggggga attctgccca aaccctcact gtgcagatga ggaaatggag gcaggggagt |
| 42541 | cgtcccaggt tatacagtca gtggctagct ggactgggac tagaacccag ggcccaggaa |
| 42601 | ccacccagcg ctctctctgc acctccacct ggcacccatg ctgcccccgt ccctgccccg |
| 42661 | atttcttgcg tggcttcgaa cggcagtgct gtaacttcga gcagtccagt cttcccatct |
| 42721 | gtggaatggg cggggacagg ggacactggt cgctaaaggc gctgccagcc ctcccaggga |
| 42781 | ctctgacaac tttgctcttc ctctttctgg gttatttctt catatcctgg agccagagta |
| 42841 | gtgaacgagg cggaaacagc aatgccgggg tgcccctcta gtctccatga aacgggcccg |
| 42901 | gcccatcaac gtggaaaata tctcaaccta cccccacccc taggcagcct tgactggtca |
| 42961 | gaactgataa ccacctcatt catgcattct ttcacacaca cttagtgagc accttctgta |
| 43021 | tacccaggtg tgggtcacag gtgagtcgga gcgccatcaa agagttcagt ctagtgagat |
| 43081 | ggttgcatgc ctgtggtcag gactgtgatg gggaatgtgg tagcagggtc gggggcaccc |
| 43141 | ctacccccaa agccctcctg gacctgtgct ttgatgcttc aagttccact tccaaagagt |
| 43201 | ctgcagattc cagagcgagg accctgggct ctctcctacc ttcccagtaa cccatgtgtg |
| 43261 | gctttggaca agtgcctctg cttcacaggg gccttggttt ccccaacgag gatgactcca |
| 43321 | aagagggagc atttgggggc tctgctagga atgtgtgtag aagtccacaa ctcattccct |
| 43381 | ttgcttaagc tggggtcaca aacctaacgc cctgaaggcc aggcaggtaa caatggtgag |
| 43441 | aaggtggggg ggcaccgagg gcacttgtgt gactcctcgg ttccagatag ctgttgccat |
| 43501 | ggggaagacg ggcccagagt ttccacatct ttcgatattt caagaaacac tggagatatg |
| 43561 | tatttatatg tgaaatctct aacctaatgt gaaatactct gaaaacacta tgtgggcaga |
| 43621 | aacatacctg tggtctgcac cccctccagc tggcgcccgt ggtttgactt tagggtgatg |
| 43681 | acgtgcacac cttcaaaggt gctgagccct gggagccttg tcagtccaac acgatgtagt |
| 43741 | gtgaacaagt taaccagctc gtctcggcag ttctgggagg agagaaagat gggaaccctg |
| 43801 | gggctccatg gtggggggca ccacagaatg ggcaggggag gctgtagcca ggggtgcccc |
| 43861 | catcctgcca aagggacctg gggccaacac tggaccctgt ttgacaggca gacaagaggc |
| 43921 | cagcagaggg caaggctggg agcccgctca agggccgact ggtgacctca tggcggatgc |
| 43981 | ccggggaccg gcccacgctg ttcaatccgt tcctgctgtc tctgggggtc ctcaggtggc |
| 44041 | gaagggtagg ctggctccag tggggactgg aggggtgagg gtggatagag acggggatgg |
| 44101 | gagggaggag ggggctgtta agcaaaggag agagagtggg ggctgaggag gaggcaccta |
| 44161 | gggccgtcgc atgacaggag aggtgggagc agagctctta agctcatcct ggtctcagca |
| 44221 | agcgagtggg tttcccactt ccggggcagg cttgggggct gctttcagct tttggagtga |
| 44281 | ggggtgatgg aataatctac acagctgaaa gcttccaatc agcagcctct cgccagccct |
| 44341 | gggccaacgg ggagccaggt atgggggaag ggaaggcgag cttataagtg gctctgggat |
| 44401 | tgcaaagtgt gtctcagacc tgggcctgag ccagtttcac aaacatctgg cgttacgtaa |
| 44461 | cccatcccct gcccagagag gcctggaaac actcaagcct ctggctgggt tttccacaag |
| 44521 | ggcaggcagc tgagacccgc tccctcccac ccgcttcaca gcaggacaga aggggcctgg |
| 44581 | ccatctccag cagccacagg ctggctcatg gggtctcttc tctctttgag aggctgactc |
| 44641 | tcttactcac cgctgttggc tctgagtcca gcactaggct gggcacctca gagacagtgt |
| 44701 | gcccatttta cagatgaagg gactgaggcc cagggaggtg agctgacttg cctgaggtcg |
| 44761 | cacagcttgg ggtataaagg agctgatttt cctcattctc agatgagaga agggttgtag |
| 44821 | ccaaacttac tgagcctcgg ttgccacatc tgtctattag gaaaaagtct gtggagactc |
| 44881 | agggctgcag agagggctca gggagatcag gatgcatgga ggttgcgggg ctgttgtcga |
| 44941 | aacactaact ttcccatcca cttcagaatt tccttttttt aaaaaattaa gacggagtct |
| 45001 | cgctctatcg cccaggctgg agtgcagtgg caccatctct actcactgca acctctgcct |
| 45061 | cccgggtcca agtgattctc ctgcctcagc ctccagagta gctggaatta taggcgtgcg |
| 45121 | ccactgcacc cggctaattt tttgtatttt tagtacagac agggtttcac catgttggcc |
| 45181 | aggctggtct tgaactcccg acctcaggta atccgcccac cttgacctcc aaagtgctag |
| 45241 | gattattggt gtgagccacc acgccaggcg tttttttttt ttttttttta aattaagata |
| 45301 | gagtctcgtt ctacccccag actggagtgc agtggcacca tctcggctca ctgcaacctc |
| 45361 | tgcctcccag gttcaagcga ttctgccatc tcagcctccc gagtatgtgg tactacaggc |
| 45421 | gtgtgccacc acacctggct aatttttata tttttagtag agatggggtt tcaccacgtt |
| 45481 | ggccaggctg gtttccaact cctgacttca agtgatccgc ccgccctggc ctcccaaagt |
| 45541 | gctgggatta caggcgtgag tcacccagct gagcccagaa tttcctttcg ctgctctttg |
| 45601 | tggttaaggc accgagggtg agcaggcaag catggttatc tgagtagtgt ggtaccttta |
| 45661 | agccatgggc aggaattacc ttgtctaact aaaggtcacc aacacacagc acgtctggca |
| 45721 | ggagggggca ggtaagtcct tggtagagcg aaggaggagc gaagcaggga aagcactctg |
| 45781 | gggtaatgat gctggctaac cagcacttat tgtatgccta ctacatgccc agctctgtgt |
| 45841 | tcactgcatg gcgccaccta attgcatttg atccacactc ccaggtgcag ttagacgcct |
| 45901 | actgtccatt ttacagatga tgaagtgaag ctcagagagg gagggtcact tgctccaggt |
| 45961 | cacacaggga gcaaggggca gaactgagat tcagaccctg ctctggctga cctcagagcc |
| 46021 | cagtgcttcc aacacgcccc ctacaccact gccttcacat cctgatctct ctgagccctc |
| 46081 | ctgcagctct gggagtcccc acagattttc cccattagaa agatgcggca accgaggctt |
| 46141 | ggtgaggttg gctacagtgg ttctctcatg tgggagtgag ggaaatgaag agctagggat |
| 46201 | ggaactgcca gcagggcctc ccagttacac agagcagatt taaacttctc ttgggctgaa |
| 46261 | gcagtgaaat tagcccaagg ccaagagcca gaaagcctgg agtcgagttc tggcttggca |
| 46321 | cctaacttgt gtgcccttct ctgagcctta ccttattatt ctcagtagag taacggtttg |
| 46381 | agactggata acctcgaagt ttggtagctc tggtctttgc cagtttaata actcacccct |
| 46441 | gggtccctga ggctgtgctg tctctgacct gccaggatga gttgtggttt cttcattggt |
| 46501 | gcattcattc attcgagccg tgcttacgga ggatgtgctg tgggcttagg ccctaggctg |
| 46561 | gtttccaaga tgtagacaaa aaacattcca gccctggcca ctggagccca gttaggtaag |
| 46621 | gacactgaca tgtaactgat gagaacagtg tggtcaccac tttagtgggg aaaggtacag |
| 46681 | atgtagggag cactgggcca gcagttccta agtctgctgg ggacactttg gcttcctttg |
| 46741 | gtctgagact tcaaggaaga aattttccag gccaacaagc attgggaggg ggaaggggag |
| 46801 | aaagagagag agaatgtgtg tgtgtgtgtg tgtgtgtgtg tgtgtgtgtg tgtgtgtgct |
| 46861 | gggtgtgtgt gagtgtgtgc tgggtgtgtg tgtgtgtgtg tgctggggta cagaagacag |
| 46921 | gaagagaagt gttccaggca cagcagagaa ccatcagggg gtagaaggac ctgtcttatc |
| 46981 | ctgggaattc ctagtagtcc agtgctgtgt atcttttttt tttttttttt ttctgagatg |
| 47041 | gagtctcgct ctgttgccta ggctggagtg gaatgcagtg gtgtgatctt cactcaccgc |
| 47101 | aacctacgcc tcccaggttc cagcgattct cctgcctcag cctcccaagt agctgggatc |
| 47161 | acagccatgt gccaccacgc ccggctaatt ttttgtattt ttaccagaga cggggtttca |
| 47221 | ccatgttggc cagcctagtc tcgaactcct gacctcaggt gatccacccg cctcggcctc |
| 47281 | ctaaagtgct gagattacag gcataaacca ccgcgcccag cctccagtgc tgtgcatctc |
| 47341 | tttatttact tattgtattt tgcaaaattg accaaagtat gtgtctctcc agcctgtcaa |
| 47401 | atgagaatct ggaaggccag gatgacaggc aggagccagg ttgtgatggt tcctgactgc |
| 47461 | ctagaagagg aatgtagcac tgatctgtca gcattggtga tgtgtggaag aactttgagc |
| 47521 | agggaagtgg tctggtcact gtgttgcggg tactaggagg agtcgcaggg gccagaaaag |
| 47581 | cctggaggag gctggtgctg ttaggtgccc agggcactgg accaggaccc tggtggtagg |
| 47641 | tgaggtctcc tgcgtgttca ttcactctcc caaggactga ctgcctgagt gaggtgcaag |
| 47701 | ggtagggtga gaaaactcag cccggggtgc cagaaggcca gtttctagag ttagatggac |
| 47761 | ttaaccttgg cctcattcct catggtggag agactcctgg cagcaaatgc tgggaaagaa |
| 47821 | cttcagctcc ctgggcctcc atttctttat ctgcaaaatg ggaacagtaa ttataaaagc |
| 47881 | aataattttt ttttttgaga gggagtctcg ctccgtctcc caaggtggag tgcagtggca |
| 47941 | caatctctgc tcactgtaac ctctgcctcc cgggttcaag cgattctcct gcctcagcct |
| 48001 | tttacatagc tggattacag gcgcctgaca ccacgcccgg ctaatttttg tatttttagt |
| 48061 | agagacgggg tttcaccatg ttggccagtc tgctcttgaa ctcctgatct caatgatcca |
| 48121 | cccacctcag cctcccaaag tgttgggatt acagacctga accaccgcgc ccggcaaggg |
| 48181 | caataatttt tgaaccccaa atcaagatga cagaataatt gaaatgccaa ttattccaag |
| 48241 | cttccctgcc tccttgccta aggatagcta atgagggata aagaggttgt cctaggtgcc |
| 48301 | ttacttgaat taacacttaa tccttccagc aacctcatga ggtaacagca ttaccccatt |
| 48361 | ttacagagag tgaaattgag caccgagagg tgccttgctt aaggtaacac taggctggaa |
| 48421 | tccccgtgcc acacgaactt cctagtgcat ttagcaacca attccaccac ggtccctact |
| 48481 | cacctgcagg aaaagagcat ctaacaaacg gcccagcgtt ctgggaacct gagcaacggg |
| 48541 | tgcacgccca cacctgaaaa accccaaacc aaaaaagacc catttgtgag gagtgggcat |
| 48601 | ttgggagaga ccctgccatc caagaactca ctttgtgtcc agcttactcg ctaggaattc |
| 48661 | cgcctcttcc tgtgtgacct cgggcaaatc ggctcacccc tctgagcctc cgttttctca |
| 48721 | ttagcaaaat aagacctccc tcccaagtct gtggtgagga cgaaaatcga ctcttggcga |
| 48781 | gtgggacccg ctgagtcgtt agtactgggt gctttgcccc ggtccccgcc aaatcacggc |
| 48841 | gccgagccct agcggaccca tcgctccggg gccgggtcgg gaagcgcagc ctgggcgagt |
| 48901 | cgtgcccacg cccggccgcc cgcatcctcc gcccccgcgc cattgccgga gtcacctgca |
| 48961 | ccctgggccc ttccttcctc ccagcgcgcc cgcggcccgg gcccgcccgc cctccggccg |
| 49021 | ccaccgccct cccttccctg cggccccatc cgcccacccc gccgtcccgc cgtcccgccg |
| 49081 | ccccgccgcc ctagcgcgcc cgtcccgttg cggcaggtcc cgcccccggc ccgtctcgcg |
| 49141 | cttccattgg cccgccgcgg cccccgccgc tgtttgtctc ggcttccccg ccacccattg |
| 49201 | gcccgctcgg gtcctcccag gaagtttgaa aaaaaaaaaa aaaaagtttt atgggcggat |
| 49261 | ggaaggggcc ggggcagcgt cggggaaagg aagggccgga ggcgcggcgg cgggcggccg |
| 49321 | agaggggcgg cggcggcggc ggcggcgggg ttcccgcgcc gcggagcccg gcccgagagc |
| 49381 | cgcgtccacg ttcctgcctc ctgctcccgc cgccctgggg cgccgccatg acggtgagtg |
| 49441 | ccccagtcag ccgcccgcgc ccgaggccgg gagaagggcg acgacccgag gcagagccca |
| 49501 | gcctctcccc tccggggcag ccccctcctc atttcccgaa ggcgagagga gggctgggcc |
| 49561 | ggaagacggg gccacctccg aagcgctttc ggccagaccg gcctcaccct tcccgcaggc |
| 49621 | tcctcctcgc cttccctcgc ccactcgccc ccgggagccc aggcgaccct gaggggacgg |
| 49681 | aacgacccgt ctcgggcgcc ccctcctcac acttgcggca ccagtcacgg gtggattcgg |
| 49741 | ggcgaccctt tcccacctcc cctccagccc cctagacgaa gacccgattc cccaaggcgg |
| 49801 | ccaggggccc cagggaggag cggaggtggg cctgggctgg ggaggggcgc tcgtgggtgc |
| 49861 | ggatgggtcg cgctgacccg ggcctgggca agccagccct ccgtgtggcc gctggcccga |
| 49921 | ggtcgggtgg gcgagaagtg gccggaccgc cccacccaca gcccgggagg cagtcccggg |
| 49981 | acgtctgaag cagcgggata ccacgtcttc ctgggcttgc actttgcagc ggtcctgggg |
| 50041 | ccttgggaca agcctgcgag tctgagtagg gggcatgatg gcaggggttt gcctttctca |
| 50101 | tgggggtgag ctgtacccaa gccccatcaa ttacctgtgc catagttagc atattgagcc |
| 50161 | tcacagctgg gttcgctgga ctccccactt cacagccaga taaactgagg cttggggagg |
| 50221 | ggcgctggtg agttgcccga ggtcacccca agtataagag aaggagtagc tcctttccct |
| 50281 | gtccttctgg cccactgacc gtgatgttcg ggaagggagg ggtggggctg cttttggttt |
| 50341 | ctggctagtg cttcagggag gctctgacag cccagtggcc ctcctggggg aggatgagca |
| 50401 | gggtgtgtgt gtgcacaggc ggcagtaggc ctctttcagg ggagtggaga ccctgcggag |
| 50461 | gagtgggtgg gctgctgggg gcgggctggg ctgctggggg gcgtggcacg cctagcccct |
| 50521 | gccctgtgag tgtgatggcc tggacttcct cggcgtcctc ctggacatcc tgccacctcc |
| 50581 | ctgctggccc ttcctgtcgt cagcagcctc cccttttctg tcaggagcag aagggatgtg |
| 50641 | gggggaggag ctgagtcagt gtcctggggc caggaggaga gaagttgcct tgcccaccgg |
| 50701 | gtgcctgccc ggccctcagc cgggtgcttt cacgttacca gatttgatcc ttgaaggttg |
| 50761 | gtagtaacat cttaatcaaa cagatgagga aaccaaggtg tggcgaggtg aagtgtcatg |
| 50821 | ccccaggtaa ctcagtgagt cccaggctaa gccagaattt gtatccaggt ccgttccagc |
| 50881 | tttctttcac agttgcctgt cctgggggca gcacgtgctg agcaagggta aggctgccgg |
| 50941 | aagcagcgtg tggggtgctt ggaagatgga cagcacatcc ctgctggtgg cagcagcctt |
| 51001 | cctgagggag gtgtcctcct gtgattatag ggccttgtca ggtggagatg gactagcgag |
| 51061 | gagacagcag tgtggacaga aacgggtggt catgtttgag aagtagcaag agcgtaggga |
| 51121 | aggggtctgg ggaggagggc ctcactgcta gggcttggac aggggcaata gagagccatg |
| 51181 | aaagctttta gagcagagag gaggctatga tcaccattaa tagtgttcat tgagttcatc |
| 51241 | ctggctgcca tgcagacctc agcctgctct cagctggtgc tcctcctgta cccacctcac |
| 51301 | accctcctcc cctggccccc gtgccctgaa tcagggatcc atacagagca agtggcacag |
| 51361 | gtgtgtgagt gtgtgaggct ccggggcttc agggagttgg gattctcttc cacccctttt |
| 51421 | gcctttgcct gggtgcagct ttgctcccgg atcagccttc cccctcgcct gctgggcatc |
| 51481 | aaattatatt tggtcccttg tttactgtct ctttcctaca gtccaccagg gcaggggcca |
| 51541 | cagctcttgg tcacagctaa tttcctggcc tagaacagtg cctgataact ttaaaaaaaa |
| 51601 | attttttttt ctgcaaacac tccctgagcc cctatctgtg ctgggtcctg gcaggtaaac |
| 51661 | agtgtatgtc cctgactgtg agttgcatct aatctagcct gtgaaggata agtaaagggc |
| 51721 | ctcaagatag tcacggatgc aacagaggcc tctgagaggg gccatgggag ggcaggacgg |
| 51781 | gggcggctgg tggtgcggtg agtggcatga actgtgaagg gacctcagag gtggccatta |
| 51841 | agctgggtct taaggcctga gtagccgctt gcctagtcat cggaggagga ggaagcatag |
| 51901 | tgtttcaggc caaggacatg gcacatatga agggcccgga gtcctggtgt gttgtgatcg |
| 51961 | gcaaggaata tgcagtggta taaacagggg cccctcagca aggggaggcc aggctggaag |
| 52021 | agtgtgatga ggcttccctg ccatcctgag gcagctggac tttgttttaa agccacctgg |
| 52081 | agaccgggtg tagtggctta tgtgtgcctg taatcccagc attttgggag gctgaggtgg |
| 52141 | atggatcact tgaggtcagg agttcgagac cagcctggcc agcatggtga aatcccatct |
| 52201 | ctactaaaaa taaaaaaatt tgctggacat ggtggtgggt gcttgtaatc tcaggtattt |
| 52261 | gggaggctga ggcaggagaa acgcttcaac ccgggaggtg gaggttgcag taagccgaga |
| 52321 | tggcgccatt gcactccagc ctgggcagca gagactctgt ctcaaaaata aagcaagcca |
| 52381 | cctggagccg tccctggaac tgttaagcaa gcctgggata ccaagccttt ttgagtgagt |
| 52441 | cccgccagcc cgagggtgtg tagaggggtt gtgtgcctgg ccaggtagga ggcggggctg |
| 52501 | tgagaacctg ccagtactcc cgaaaggcgg aaggagaaac tgagcttcta gcaggtgaag |
| 52561 | aagaggtagc tgggcctgaa gagccctgta tgaaggggca tcgtgggaga tttagatgat |
| 52621 | cggacctttt gaccctgggg acaggtttcc ctgccagttt aaaaactcac attggttggc |
| 52681 | cgggcacatt ggctcacacc tataatccca gcatttttgg aggccgaggt gagcggatca |
| 52741 | cttgagctca ggagtttgaa accaacctgg gaaacatagg gagaccccat ctctacaaaa |
| 52801 | aaaaaaaaaa aaaaaaaatt agctgagcat ggtggagtgc ttatgtcgtc ccggctactt |
| 52861 | ggaagctgag gtggaaggat cgcttgagcc caggaggttg agtcagcagt aagctgtgat |
| 52921 | cacaccacca cactccagtc tgggcagcag agcagggccc tgtctcaaca aaacaaaact |
| 52981 | caaattggtg accttctatc cccaaggtca ctgtgtcatg gcgtgcctga catggtatgt |
| 53041 | gatgtgtctg tactgggctc tggaggatca ctaggtttct ccttgtacag acacgttcag |
| 53101 | tcctgtcgga agctgcggga ggggaggacc gccccgtcat ttgccacatc aggcagccag |
| 53161 | gactcagaga ggggatgtga cttaggaagg tcacagtgac tccacttccc aggcagccct |
| 53221 | agaggttcca gcctgacagc ttgtcattcc tgccccaatc tcccagccct ggcccaggga |
| 53281 | ctttcgcctg ggactgccca gtggtgccag ctctgtgggc ccaggaagcc tggctcctcc |
| 53341 | gggctaggtg ggggtagggg agatggccca aaaagcacag aaatttagac cagggggtag |
| 53401 | atatttcctc agcaagtttt tcctgagcct tgctgtggtc aagccccctg caaggccctg |
| 53461 | gggccacagg aggtcccaga ctgaggggaa gtggagccag gtgtggtcac caatcttcat |
| 53521 | tcttagcttg ggatcgccct gggcagcctc cgtctcaggt ggaagacggg gtgggcagaa |
| 53581 | tacagagcag cgggacaaac gcagccccag gggttctcgg ccgtgagcag agcctgtgtc |
| 53641 | tctcccttag acaggtatac agggaggggc tgggatgcca acctactggg tcccccgact |
| 53701 | gtggctgtgg aaggttctgg atcttcagct gtcccaagcc ccggttggtc cacttcctat |
| 53761 | acctgagaag gggctccgtg ggtggagagt gggtcgggag aggtggccag gcagggtggc |
| 53821 | tgtggtttcc agctgccact gtcaccgccc actccactga gccatgccac ccgttctctg |
| 53881 | caggcaacca gacaccttgg cctggtgagg cctcgatgta ggggctgata ggtaggctca |
| 53941 | gagccatggc aaccggtggc cacctcctcc ctgccggcgc caggagcgga gactgcagag |
| 54001 | ggaccgggac ttagatgaga gaggtctccc cagcaggaag ggagggtctg gtggttggca |
| 54061 | cccactagat gagcatggtc agaaaaatat caggatgagc aacttcttta tctaggcctg |
| 54121 | ggtgggggtg cctggcacag gtctccatgg gacatgctgc agctggtagc ccccagaccc |
| 54181 | cggggctgtg cccccctggg cggcacccag aaggtagggc ttgccaggac tgacccttcc |
| 54241 | caaagagatc taggcgggga ccagagggtt tctgacccca gcctgtgact ggctccacct |
| 54301 | cccatagtct cctggagccg aggaaaggac aggactggcg ggcccatggg agggtccgtg |
| 54361 | gggcacttgg tcctcgtcag agggaggaac tggacagttc gcgcagtgct gctggtctgg |
| 54421 | actgccctct gagctctcag ggggtctcta tgcaggcaga gtcctcccag cccctctctc |
| 54481 | ccattcttgg gcgaggggtc ggctggagag aggcccctgg gacatctggg tgtgtgtgcc |
| 54541 | agccacccag cccaacttct tggctctctg agtgccacta tcaggaaagg ggccagggct |
| 54601 | gcctcagtgg ctgggaggcc tgcttggact tgggggttac ctagggcctt agccctcttg |
| 54661 | gctggcttcc caggagctcg gtcccacagg acttggggac agggtgggtg cagcacgctc |
| 54721 | ccctcaccag cccccattgg cttcctgctg gacccaactc acctccctcc tcatctcccc |
| 54781 | acagcccgat ctgctcaact tcaagaaggg atggatgtcg atcttggacg agcctggaga |
| 54841 | ggtaagagga ctgaggccgg aggggaggaa gctggcttgt gctgctgctg ggcccctggg |
| 54901 | cagcccagga gtgggggtgg ggctggggct ggtgtgagaa ccctgggggt ggggctggga |
| 54961 | ggggtggagg ctgcccatta ggcttctgcc tcctggagca gtctgcagtg tgtaaaaggg |
| 55021 | atcacagcaa ggggccgtct agcccctcac acccagtgcc ccatcccttg atctcatcaa |
| 55081 | gagtctcttg gccctgccac ctcagtagga gcctgggtgg gagtcaaggg tcttgggtgg |
| 55141 | aagggctcgt agaagctgtc tggcccgaga cacagattcc taaagcctgg tctgaggggg |
| 55201 | gtggggctca gggcgcaggt gctggggttt cacccacctg gatccccact ggttgagtca |
| 55261 | aagcctcctc tagtcctcag tggccacgtc tgtgacatgg gcataatgga taatggtgat |
| 55321 | tctttctaga gtggataaca aggtcagaga gatcaagcac gtacaggtgc cacaaagctc |
| 55381 | ctggcactta ctgtgggctc agctaaagac ccttcccttc ctctggcata tgtgtccttg |
| 55441 | gaaccagcag ggacagtggc tgtttcctca gctctgttct ttcggctgcc aggctggctc |
| 55501 | cctgcccaca ctgcctgggc aggagcgtct ccccacccct gccctgcatg cgcctgctgc |
| 55561 | tctggtctgc gtgcagcctg catgccggag agggctttga gccagagggg atttcattgt |
| 55621 | gtttccggcc cacatgtttt attccctcca gcccacagcc ttccctaccc gctgcctgcc |
| 55681 | cgctgtccct ggtggctgct ctctaggctc acacaaagcc cggcaccccg ccagtgaccc |
| 55741 | cttcctggcc tccccaccca gggtccccgg agggcagagg gattacaggc cccacccaga |
| 55801 | gctggccatt agtcatcctc tatcacaggg ttctggaatg tccgaactgg aagggccctg |
| 55861 | ggaattcagc cagcccaacc ccttggtgca cagacaggag acgggcccat gagggtgttg |
| 55921 | gtctcttcca ggcctaggag cacctggggc agacccaggc tcagaactca gcgcacctga |
| 55981 | ggcccatgga gctccaccca gcttccatct cagacagtca taggctaggc ctggaagagc |
| 56041 | taaagaaacc tcttggcata gaacccctgt cctactttac agagaggcaa ttgaggtctg |
| 56101 | cagcagcaac tccgtttact tagtgagagg aaaatgcttc taagaggcct ggcctcccag |
| 56161 | aacaaaccca gcaacctggt tggtgtccat ccctatgcca agggccatga cagccatcca |
| 56221 | cacaagagag gatgggcgcc gctcgcctca ccagaaggtc taggcacttc tttttttgtt |
| 56281 | ttttattttt gttttttttt ttctgaggca gagtttcact cttgttgccc aggctggagt |
| 56341 | gcagtggcgc aacctcggct cactgtgtct tccgcctccc gggttcaagc gattctcctg |
| 56401 | cctcagcctc ccgagtagcc gggattacag gcatgcgcca ccatgcccat ctaatttttt |
| 56461 | tttgtatttt tagtagagac agggtttctc catgttggtc aggctggtct cgaactcctg |
| 56521 | acctcagatg atccaccctt ctcagcctcc caaagtgctg ggattatagg cgcgagctac |
| 56581 | cgcgcccagc tatagggact tcttagtagc cctactttat ggttcagaag actgaagctc |
| 56641 | agaaaagtgg agacacttgc ctaaaggcac acagagagaa agggaactct tggatacaaa |
| 56701 | actccttttc tcagggaggc aatgtggaaa gaagcagaag gtatcgtcgt tgcatgcccc |
| 56761 | ttgagaactt accatcttct tgaggagaga aaactaagta cttgaaacaa ccaacagcac |
| 56821 | agacagggct tggtgatgtg agggaaccct gggagggctg gggaccgggt gatatgcact |
| 56881 | gaccctggca gtgggcgggc cgcgactggc attccagtgg agtgaccaga agcccagagg |
| 56941 | tgggctgggc ttggcatact atcaggctgt tctggcgccc ccaccccttt cctacatgtc |
| 57001 | ctgccaatct aaccccagct ggagcagaga caggcactgc aggaaggcac ccaatcacaa |
| 57061 | atcctaaact tacagcttag ggcgctctca cctgctgcgg atgtgggtag ccagcctaca |
| 57121 | gttcaagaag cagaccgtgc atctgggcgc ggtggctcac gcctgtaatc ccagcacttt |
| 57181 | gggaggccaa ggcaggtgaa tcacctgagg ccaggagttt gagaccagcc tggctgacat |
| 57241 | gatgaaaccc tatctctact aaaaatacaa gaaattagct gagcatgatg gcgggcgcct |
| 57301 | gtaatcccag ctactcggga ggctaagaca ggagaatcac ttgaactcag gaggaggggg |
| 57361 | aggttgcagt gagtggagat tgcaccattg cactccagcc tgggcaacaa gagcaaaact |
| 57421 | cctccatctc aaaaaaaaaa aaaaaaaaag gcagcagatt gtggctggca ctcactccta |
| 57481 | ctccagggct ccatccagtc ctacttccca ggggaccatt gtccctgacc atggtgatga |
| 57541 | tctgggggaa tatggaaaaa gacgtaacgt cctggccccg ctgagtccct gacttgctta |
| 57601 | cacaggtcat cacccctccc tgtctgcact gggtccgggg tgcctgagga gccttggcaa |
| 57661 | tcttaaaagg agctccaaga aggaaaggga gggtgtggtt acggagggga aaccaatcca |
| 57721 | tttcacagat gctacccctg aggctcagag aggaaatgga ggggccaggt ctcaaattgg |
| 57781 | cattttccgc ctccccaccc ctcctgtgtg cagcatagtg agtttggcag ccacacagga |
| 57841 | cacctgtaca atcacacaca ctggctcttt cattccatcc tccttgcagc ctccctcccc |
| 57901 | ctcgctcacc accacctcta cttcgcagtg gaagaaacat tggtttgtgc tgacagattc |
| 57961 | aagtctcaaa tattacagag actccactgc tgaggaggtg aggccatggg tgtactgatg |
| 58021 | aacccccgga agggcctggg gtggcctggc tgggttcact ggggtgggtc acaccagggc |
| 58081 | ccacacggac catagtgggc cctcttgctc caggcagatg agctggatgg tgagatcgac |
| 58141 | ctgcgttcct gcacggatgt cactgagtac gcggtgcagc gcaactatgg cttccagatc |
| 58201 | cacgtgaggc tgtgtgcagc ttgggggctg gtggtgggca gcatggctgg aggtccctgg |
| 58261 | gggaggtttt ggtgttgaac atggctcacc atggagactg gatcccttca ctcatttacc |
| 58321 | cagaggccct atcttcagag ccagagctgt gatgccaaca cttagcatat ctgggggaga |
| 58381 | cgctggagcc agcagggctc ttcccaggcc aatggaaggg aggttttgta ccccctgccc |
| 58441 | accccagact caagacctta gatgcatcct gggaaggaag ggccaccctc cctggggtcc |
| 58501 | atagtgggga gggagtcatg cggctggcca tgtggcaacc tacccatgcg gtggccttgc |
| 58561 | agaccaagga tgctgtctat accttgtcgg ccatgacctc aggcatccgg cggaactgga |
| 58621 | tcgaggctct gagaaagacc gtacgtccaa cttcagcccc agatgtcacc aagtacgtac |
| 58681 | taagctggac tggggccttg agggaggcac ttacccttgc gtccccgagt gggtttctag |
| 58741 | gtactcacct gagggctgca cctttctggg ccctcgtttc tctgtcaaca acatgggaag |
| 58801 | agagtagtga gcattctcgg tatcatccag aagtacactg agggtttgag gtttgatctg |
| 58861 | tcttctcaaa tgtgatgggg cctcttctct ttggaggaga tgcctgtgag tcaaaagccc |
| 58921 | ctgccaggtg gctgttctgt ctctgtgtct gtgccgtggg ggccgtgtct aagcctgtgt |
| 58981 | taggaagggg tggttaggta gttcagcctt ggcgcccaca cctcccggga tggggagctc |
| 59041 | actccttctg gaggctgcca cgggcactgg ggcaggaggg ctgagttacc gagtggcaga |
| 59101 | gccccccaca gtttataccc agatgcccat ggcgggctgg gacttggagc tgctgggcag |
| 59161 | cgggaacaga gtgtggtatt aaagggggct gggctgggtg tagtggctca cacctgtaat |
| 59221 | cccagcgatt tgggaggctg agatgggagg atcacttgag ctcaggagtt caagaccagc |
| 59281 | ctgggcaata tagtgagacc tcgtccctac aaaaaattta aaaatcagct ggccgtggta |
| 59341 | gggtgcgcct gtcagctgag gtgggaggat cacctgagcc cggaggccga gtcccccaga |
| 59401 | ctggccacac cgcggctatt cagccttagg ccagaggctt tcctgtctag gtttcagagt |
| 59461 | ccccatctgt cacgttagca tgtcatgtct gtacatgtgc caggatgtgc ccagagcact |
| 59521 | ttgtgaactc tgaagcactg tgcagttgga ctgttattta gcatctaggc ccagctgctt |
| 59581 | taagaaagaa accccgggca cagtaacttc atcgagatag atgttcatgt ctcccttcag |
| 59641 | aacagccccg aggtatgcag tcctggcctg gtggggctcg ctctgccgtt tcaggggagc |
| 59701 | cacctgccac acccactcgg cagcctatag tcacatggct acaagtagct gtgggaatac |
| 59761 | tgcgagtgta gtttttggca gggtgaccac gtacccagct atgactgtgg ataaagagaa |
| 59821 | ttgccatagt tgttcagagt ctctgcaact tgtgttctgt gcaccccgag gtcccgcctt |
| 59881 | caccccatca gcagtgactg ggcatccccc ttgccactgt gagcctcggg aacctgggac |
| 59941 | attggtctcc tacatcacct cattgatcac catttgcaaa aagccccctg cctgctttcc |
| 60001 | acgttcgccc accctgtcct cacatccatc ctgtgagagg cgtcgctgtc ccacattaca |
| 60061 | gatgaggtca ctgaagctca aagagggcaa agagaccagt gtggtggttc acgcctgtaa |
| 60121 | tcccagagct ttgggaggct gaggtgggag gagcacgtga gcccaggagt tcgagaccaa |
| 60181 | cctgggcaat atattgagac cccatctcta tcaaaaattt aaaaaattag ctgggcgtgg |
| 60241 | tggtgcatgt ctgtagtccc agctactcca gaggccgagg caggaggatc acttgagcta |
| 60301 | aggagtttaa ggctgcagtg aactatgatc acaccactct acttcagcct gggcagcaga |
| 60361 | gtgagaccct gtcccttgaa aaacaaaaac aagaacgggg gcgagggaag ccgggcatcc |
| 60421 | tggtgggtcc ctgggctgtc aagaggtgga gctgggatgt tcctggggtc tgttaaccag |
| 60481 | gaagctcagg tcgggctgct tccttccctg gggtctgtct ccagcccctg gcacagggcc |
| 60541 | tggcacacag gtgtcgctcc aaaagtgctc attgtgggac tgcaggggtg aggacccacc |
| 60601 | tgacgtggct ctgctggtgc cctaggctct cggactctaa caaggagaac gcgctgcaca |
| 60661 | gctacagcac ccagaagggc cccctgaagg caggggagca gcgggcgggc tctgaggtca |
| 60721 | tcagccgggg tggccctcgg aaggcggacg ggcagcgtca ggccttggac tacgtggagc |
| 60781 | tctcgccgct gacccaggct tccccgcagc gggcccgcac cccagcccgc actcctgacc |
| 60841 | gcctggccaa gcaggaggag ctggagcggg acctggccca gcgctccgag gagcggcgca |
| 60901 | agtggtttga ggccacagac agcaggaccc cagaggtgcc tgctggtgag gggccgcgcc |
| 60961 | ggggcctggg tgcccccctg actgaggacc agcaaaaccg gcttagtgag gagatcgaga |
| 61021 | agaagtggca ggagctggag aagctgcccc tgcgggagaa taagcgggtg cccctcactg |
| 61081 | ccctgctcaa ccaaagccgc ggagagcgcc gagggccccc aagtgacggc cacgaggcac |
| 61141 | tggagaagga ggtaggcacc acggctggct ctctaggagg ccccttgccc cagcgcccct |
| 61201 | ccagtccctg cattcatgcc ctggcatttg tcttgcactc ctacagtgat ggggagctca |
| 61261 | cccctgatct gctgtgagtg tgcaccccac actcctgcga actagaatct tcttccttag |
| 61321 | accttagtag tttggtttgg ttttgttttg ttttttccta gttctgccct tagcagccat |
| 61381 | agagaagaga agtgggaaga gaagggagag acctgccagg ctcacacctg taatcctaac |
| 61441 | attttgggag gccaaggtgg gagggtccct tgaagccaag agtttgagac cagtctgtgc |
| 61501 | gacatggcaa aaccccatgt ctacaaaaaa atacaaaatt tagctgggcg tgctggtgca |
| 61561 | tacctggagc cccagctact tgagaggctg aggtgggagg atggctggag cccgggaggc |
| 61621 | agaggatgca gtgagccaag atcaagccac tgcactccag cagtctggca atagagcccg |
| 61681 | actttgtctc agattaaaaa aaaaaaagaa gaagaagaag ggcgagaccg tttattgttc |
| 61741 | atcttctgcc cgtggcctcc ctgcctgcac tgactcgtgg aatcctcaca gcggcctcta |
| 61801 | cccctagggt ggacttcagc agttttactg acgggaaaac tgaggctcaa agatgtttcc |
| 61861 | tctgtcacct ccatgatgtg taaacatctg tgaccacagt ttccttttcc tatccctgtc |
| 61921 | tagccttctc tgggccaagg ctctcccagg tcattgacct ggccatccag gaaacagccc |
| 61981 | agcgtgtccc ctggctacat ctcactccag ggctgcttgc ccttctcaaa ccctgaggca |
| 62041 | ttcctaagcc ttccagggac gctgggcttg tatccgtgtg gagctggaag cctgcgggct |
| 62101 | cctcactgcc ttccaccagc cctgccccag cttccaggtc ccactgacca cccttctccc |
| 62161 | tcgtaggttc aggctcttcg ggcccagctg gaggcgtggc gtctccaagg ggaggctcct |
| 62221 | cagagtgcac tgagatccca ggaggatggc cacatccccc cgggctacat ctcacaggta |
| 62281 | aggccggggg gctgtttttc agggggaggg ggcagatttc tgcttgccgt gttatcagga |
| 62341 | aacagctgag attttgggag cccttcctgt gtgtgctgga acctgtgtgg ggcatttgac |
| 62401 | atgcgtcatc tcatttactc tccccacagc tggtgggcgt gatcactgtg cccgttttac |
| 62461 | agacaaggcc actgagctct gagaggttat gtgacttgcc caaggtcacc ccgcctgcag |
| 62521 | gtctcaaagg tgggatttga gcgagggtcc ggctgactgc agagcctgtg tgtgagtccc |
| 62581 | cgtgtgacac tctgcacttg gacccttgcc ccggggaagt ggggggctag tggccccgag |
| 62641 | agtcactccc tgaacacagg gaaatcctgc cgaggcccac tgggccaagg ccccacacaa |
| 62701 | ggaggtctgc aggacagggg agcctccagt agccctcaga gaatgcaccg tccgcctagg |
| 62761 | acagcggttc tcaacggggt ccattttgtc ccccttgggg acatttggct gtgtctggga |
| 62821 | atacttctgg ttgtcacaac taggacaaac taactctcta gaaaaaacgt gtgtgtgtac |
| 62881 | acatatataa gtttattata aattttacca ataaaaacaa tgcttagtac acaatttaca |
| 62941 | aataaaaata tataatttta ttgtgaattc cgtacagcaa atggattttt ctcagaatgc |
| 63001 | tttcagtgat tttttccata ctcttgtatc cacaactgat taacaaaggg ggttgttcta |
| 63061 | acgtgtgctg gttgacattt ttgtttatgg taatgagtaa gatgagaaga catttgtcga |
| 63121 | aactttactg gtccatgttg tcagctactt ctttgctaga tcggatagta gttttctatt |
| 63181 | gagaatattt gagaatattc tattaagaat atttttgcaa ttttttgttc tatttacaat |
| 63241 | gtaatggtta tagatgtgag atacttctaa gtttaatctg cattattagc attttcttat |
| 63301 | cacttgctta agtctagaca atcaacaaaa caataaatca agccctgatg tgtaatgttt |
| 63361 | accaattctg cagtgtaaat actcccgctg tggccaatgc tgcattacca gcacaaagtc |
| 63421 | cctggacaga gagttgggaa gagatgtcac actattcact aggatttcca ccatgcggat |
| 63481 | acagtagatg tgattggccc caagagcacg cataatacaa cacagtgaaa tatttaggaa |
| 63541 | gtaataaatt tgagtatcta ttgccttgtc tttaacatag ttaatttaaa gtatataaat |
| 63601 | ttaattgtta atggctgtgc ttaacaacta catcacagaa ttactaaaaa tttgacaatc |
| 63661 | agctgtctgt agttatcaca ccattatcta aagtagaaaa gaaggggcca ggcgcagtgg |
| 63721 | ctcacgcctg taatcccagc actttgggga ggccgaagtg ggcagatcac gaggtcagga |
| 63781 | gaacgagact aacctggcca acatggtgaa actccgtctc taataaaata caaaaaatag |
| 63841 | ccgggcgtgg tggtgcgcac tgtagtccca gctacttggg aggctgaggc aggggaccca |
| 63901 | ctggaaccca ggaggcgcag gttgcagtga gccgagattg cgccacggca ctccagcctg |
| 63961 | gcgacagagt aagactccat ctcaaaaaaa aaaaaaaaga aagaaaagaa aagaaggctg |
| 64021 | agatctaggc cctaggcagg aggagccttc taaaaatttc caaggggagg tcacgtcatg |
| 64081 | agggggctct caggaaggca ttggctgggg catgagaagg aaggctggtt ggtgcgtatt |
| 64141 | gtggatgcct ccagtgctga gctaatagtt agaagctctg gcctggtacg gtggctaatg |
| 64201 | cctgtatctc agcactttgg gaggtgaggt gggtggatca cttgaggtca aatgttcgag |
| 64261 | gccagtgtgg ccagagtggt gaaaccctgt ctctactaaa aaaaaaaaat acaaaactta |
| 64321 | gcagggcatg gtggtgggcg cctataatcc cagctactcc agtggctgag gcaggagaat |
| 64381 | cgcttgaacc cgggaggcag aggttgcagt gagctgagat cctgccactg cagcctgggt |
| 64441 | gacagtgaga ctctatctaa aaacagcaac aaaaaacaaa acaaacaaaa aaagagaagc |
| 64501 | tcattccaca gacttttgga ggtttggggt cagacagtga catcaggaaa gtgatgttgg |
| 64561 | agtggagggg gcttgggaga gggccaggtg taaggcatta ggaaatggct gaaggagggt |
| 64621 | gaatgtcaag ggtctggagg gaggagaatt tgggactgga tgaccagatc tacggaaggc |
| 64681 | agaggggcct ttgggggccc tgaggctggg gctgctgctc cagggaagcc cggagaccgt |
| 64741 | cctggggcca agtagtggat ggagtttcca ctgatagagg agcaggcagg ggaattgggg |
| 64801 | tgggacgcag agggtgaggc tgggggctta ccttgtcctg gggaggggca ggggaggagc |
| 64861 | cagtgttgtg ccctgtagcc tcccaccctg aggcagagaa gggagctggg ggcccaacac |
| 64921 | cccagctgag gcaggtggga gggcctccga ggcccccagc cagggggctt ctgcctgcgt |
| 64981 | gctctgctct aagaagctgc aggggctgct ttctgggtgg gtggggctgg gacccattcg |
| 65041 | tacccaccta taatcagagt ggcttcatct tcctccattt tattttattt taattttttt |
| 65101 | agagatgagg tcttttactg tcacccaggc tacagtgcag tggcacagag gctcactgca |
| 65161 | gcctcgaact ctagggctca agcagtcttc ccacctcagc ctcctgagta ggaaccacag |
| 65221 | gctacaccac catgcctggc taattaaaaa aatttttttg tagagacaag gtctcactat |
| 65281 | gttccctggg ctggtcttga actcctgggc tcaagtgctt ctctcatgtt ggcctcccaa |
| 65341 | agtgctgggg gtacaagtgt gaccactgca ctggcccacc tttgtccgtt ttactcatag |
| 65401 | agccagcttt agatttcctt tagataaagg ctctgccact acaatgacgt ttaaaaggca |
| 65461 | ctgctttggc ttctcagctt actggtggca aaactgaggc ccacagaagg gtgtgacctt |
| 65521 | tgagctatag gcagacctgt gtctggagtt caggcggtct ggtccccagg tgccccattg |
| 65581 | ggtgcaccaa agtctgtcag tgtttggtcc cgttagggtg ggatgggcac ggggagcagg |
| 65641 | tgggagggga gaagggaata actggggagc agagctgaag accaggcagg tggaggagtg |
| 65701 | accccagatg cggaaggcag cagagaagaa gagctgagtc atctgtatcg ccctcaggca |
| 65761 | cgggaggagg cggatggaaa ttcggtggac ctggaggagt gacagctggg agggattccc |
| 65821 | cagctggtat ctcgggctga gtgggtgccc ttccttcagg ggttgggggc ttgctgctgc |
| 65881 | acgacagctg tcgggtggtc tggggcttca cccactggac atctggtaaa gagaaccttt |
| 65941 | ccccactatt gcagtgggga cagaggcatt tctttatcta ctttgatgtc catgtcaaag |
| 66001 | gtggcagcca ggatcaggac accttgggcc actcaggaag gtaggtgaga gaggccctag |
| 66061 | gagcccctgt tcgtcagctg agtcccacct cctgatgtca gcccctgcac ccctgagctg |
| 66121 | ctgggtctgc ctgcctggtc tggccctctt cagaagagca gtgcccaccc ccacattgct |
| 66181 | gggctcccca ctggtggatg ctggcgtacc gtctccctct gtgcacaggg ttcccgtgcc |
| 66241 | cagggagcct cgggggctgg tcctgtgagg cctgctttac ggatgccaag actgaagctc |
| 66301 | agagggggcg aggggtttgt tcaggttcac tccaaggcgc agccagggtg aagaccgcct |
| 66361 | ctgaggtcca aagtcatgtt ctgttgtcct aagccaggag acacatagag ggcaggaaca |
| 66421 | gaagccaggg gacagacacc cctgtcgcca catgaagctc ttggccctcg ctcctccatc |
| 66481 | aaatcgtccc caggtgtggc tgctggagag gcggggaggt ggcctttgcg tgggggagac |
| 66541 | agtccctcat ctggtcctct gtgccttagt ttcttccctg gctcttcttc cccttccctt |
| 66601 | tttaatgacc ttaaacattt ttttaattat ataaaagaaa tgtttacatt ttcaaaaata |
| 66661 | atttaaacaa attgaaaggc tggaaatcaa caccctcaca ctccttctgc tgccagctgc |
| 66721 | caccccaggg tcctgtcggt ggctgctgcc gcctgcctat cagtttctgg tggcagctgt |
| 66781 | aacctgtaac cacagctacc taaataatgc acatgtatta cctcacgctt ctgtaggcga |
| 66841 | gaagtctaac gcgagtcttg ccgcgctgca gccaaggcgt gggcaggact gtgttcctct |
| 66901 | gcaggcaccc gttgtatccc ttgcctgctc cagcttctgg tggccgtccg cgtcccttgg |
| 66961 | ctctcggccc cttccttcat cttcaaagcc tgcagagggg aagtcgagtc cttctcctgc |
| 67021 | cacgtcactc tgaccatccc ttcctggtca cacctccctt gaactcttcg cttctgcccc |
| 67081 | cttcgtccac ttttaaggac ccttgtgatt acactgggct tgagggataa tctgggataa |
| 67141 | tctcccgatt ttaaggtcag ctgattagca accttgattc cctctgcagc ctgaattcct |
| 67201 | ctttgccatg taacatgatg tagtcacaga tcctgggagt aagatgtgga caactttgag |
| 67261 | gggctatcat tctgccccct acaatatcct ccctaccttt tctgtgtttt ctgtgttttc |
| 67321 | cattcactgg gacggacagg tctgcacgtt tgttcccgtg agtgagatca taccacgtgt |
| 67381 | atgtcagaag ccaactttca ccacctcatt ttgggatctt tttccacagc atccacacaa |
| 67441 | aaactctgtc tagcagctgc ctgtgtccca ttgtcaagct cgatcccatc atttattcaa |
| 67501 | gagttcccct gatagggatt tagattgttt ccagttttca tctgttacca acctggctgt |
| 67561 | agggaatacc cttgttccaa aagtctctgt acacatacga ctttctgtgg gatcatttct |
| 67621 | gggagtgaac ctactaggtc aaccagtggg gtcgcaaaat gtgatgatgc caccggacca |
| 67681 | cccccaacac acaccgttgt ggcggacact cccagcagtg ggtattatta gtctgagata |
| 67741 | cttgcccatc ttgtctacta agcattattt tgtattacat catcagtttc agctcattta |
| 67801 | ctgagcacct gccacatgtc aggccctggc ctagaccctg gggactgcgc cagtcagatg |
| 67861 | ttctcagtct tcagggaatt tatggtttgg cagaggtaga accttttgag gcaggggaga |
| 67921 | ggctgcccag agacagagct aggagagaca tttaaactgg gctgcaggtc agtaaattac |
| 67981 | ccagggaggt aaagttgcca aaaaaacatt ccaggccggg cacagtggct catgcctgta |
| 68041 | atcccagcat tttgggaggc caaggccggc agatcacaag gtcagaagtt caagaccatc |
| 68101 | ctggctaaca cagtgaaacc ccatctctac taaaaataca aaaattagct gggcgtggtg |
| 68161 | gtgggcacct gtagtcccag ctactcacga ggctgaggca gaagaatcac ttgaacccag |
| 68221 | aggtggaggt tgcagtgagc tgagattgct ccactgcact ccagcctggg tgacagaaca |
| 68281 | aaactctgtc tcaaaaacaa aaacaaaaac aaaaaaacca caaaattcca ggcagtggga |
| 68341 | atagctaaag ctcagaggtg tgaacgtgct gcaaccgtaa ctgtgagatt gcttggcaga |
| 68401 | gaaaggccag ggatgagaac gtaaaggtca gccatgggaa cggggacttg actctgtagg |
| 68461 | acgaggaatc cctggagggc ttgaggcagg agcgacaagg tgaggtttgt gaatgaggag |
| 68521 | ccgtggggtg ggggtgggag caggagcagg tgcagactgg aggtgctggg acccaggagg |
| 68581 | aggtggtgta cctgcccctg agccttctcc tctggaggct ggggaagggc cgctgtccag |
| 68641 | aggaacgggg cagcctgtga caccctggcg tccggcccac aggaggcatg tgagcgcagc |
| 68701 | ctggcagaga tggagtcctc gcaccagcag gtgatggagg agctgcagcg gcaccacgag |
| 68761 | cgggagctgc agcgcctgca gcaggagaag gagtggctcc tggctgagga gacggcagcc |
| 68821 | acggcctcag gtatggaccc tggggggggc acagtgggct gggctctgag cctctgtgct |
| 68881 | gaggttcctc ctagccaaac tggggaggat tttatcaaat aagatgtagg ggtctcagtg |
| 68941 | ccacatttgg ggtaaagggt cagcaggtgt tagaagctcc aagaactggc ctgtagccct |
| 69001 | acttaaaaag ggaaactgag gcagtaaaag ataccctccc cacccccaac accaccacta |
| 69061 | ccataggtgg tgactcttcc tgctcagggg cctgcagcca ccatagagtc tgcctaaagg |
| 69121 | cacatgctac ccacgtgcgt gggggagagg ctgatcagct gcatcccctg tcctcatagg |
| 69181 | agtgcctcct ccctgggcac atgggccaga ccctggggag agcaggggaa ggtgtgagca |
| 69241 | ttgtccatgc cagctgtgtg ccaggcactg ggccccacat gtttcccaca ggagcaccct |
| 69301 | tcatcctgga caattccctc ccctcctgcc accgcacacc tgctgtgtgc ctggcacatt |
| 69361 | cctaggcatc actaggggtt tgcagaacaa tagaaatgct ggccaatgtc acatgatctg |
| 69421 | aagctcacaa cctgccagtg ctgtgccaag tgctcatgca ctcgaaccca gccttggggc |
| 69481 | cagtgtgctc tgcatttcag gaagatcgcc tttgcagccg cgtgtgttag agaccccttc |
| 69541 | cccctcagca gagtctggac ttcgccctgt aatctggcac taaggtttct gctgtgaaat |
| 69601 | ggataaaaat cacacttaag tggaataata aagaccataa atagcctcat gtccgttcag |
| 69661 | ggtggggatt gccaccaaaa gatttaccag aggcccggtg cagtggctca tgcctgtaat |
| 69721 | cccagcactt tgggaggctg aggcgggcag atcacctgag gtcaggagtt cgagactagc |
| 69781 | ctggccaaca tggtgaaacc ccatctctac taaaaataca aaaattagct gggcgtgatg |
| 69841 | gtgggcagct gcaatcccag ctactcagga ggctaaggca ggagaatctc ttgaacccag |
| 69901 | gagacagagg ctgcagtgag ctgagattgc accactgcac tccagcctgg atgacagagt |
| 69961 | aagactccat caaaaaaaaa aaaggccagg cactgtggct catgcctgta atcccagcac |
| 70021 | tttgggaggc cgaggcaggt gcatcacgag gtcaggagtt caagaccagc ctggccaaga |
| 70081 | tggtgaaacc ctgtctctac tatgaataca aaaattagcc atgcgcggtg gcaggcgcgt |
| 70141 | gtaatcccag ctactcagga ggctgaggca ggagaatcgc ttgaaagtgg gcggcaaagg |
| 70201 | ttgtagtgaa ccaagattgt gccactgcac tccagcctgg gtgacagagt gagactccgt |
| 70261 | ctcctgggtg acagagtgag actccgtctc ctgggtgaca gagtgagact ctgtctcaaa |
| 70321 | aaaaaaaaga aagaaaaaaa ggagagaaac tttcaatgtt cagaagtttc ggattttaga |
| 70381 | attgtgggta aaaccatggg tggccctgag tgggaaaaaa aaagcctcgg tctcagtcct |
| 70441 | taggagctca caatctgaga ataaagccag caggagctaa tgttggggca tttactctga |
| 70501 | gccatgcttt gttctaaatt cttcacacac cttccaataa ccccatggag gaaaggtact |
| 70561 | gttgttatcg atccctgttt tccagataag ggatctgagg cacaaggggt taagtcacct |
| 70621 | gtgcaaagtc acatcggttt atgctgactg tggagcctga gctcttgacc acgaggctgg |
| 70681 | tcaaagcaga taggccttgt ttgagagccc tcagagtctg cagggggggt gtactaggtg |
| 70741 | gggtcctacc tggaaatcac tagaacagga ggtaccaatg gtcagaccct gagctgtctc |
| 70801 | cccagtaggg tccatccaac aggattatct tcccttaata gatgggctga gagaggttga |
| 70861 | gagcttaccc caagccactc agtttatgac acaacctggg ctactctaga ctcctggttc |
| 70921 | ggtgctcttt gcatagcact ccttggtcca agtccatagt acttgcatag tactatgtgg |
| 70981 | agtccacata gtactccacc agtacatgtg gcgtctcaga gctggtggca cttggtgctg |
| 71041 | ctgacccccc tccagtctct cttgtgcctc tctgccctgc ttccagccat tgaagccatg |
| 71101 | aagaaggcct accaggaaga gctgagccga gagctgagca aaacacggag tctccagcag |
| 71161 | ggcccggatg gcctccggaa gcagcaccag taagatgatg ccggggccca actgcccacc |
| 71221 | ctgatggtta tgggttgagg aactttgctg aggccccttg gcagcggaca catcagtttg |
| 71281 | cccctagctg agattcctgc tccagtctca tggatgcaag aaacagaagc agaaggtcct |
| 71341 | caggcagacc ccatgccagt cctcacagac agtccttcag gcagcttctt gtcttggctg |
| 71401 | gtcccagcct ccacccacct cttcacccct ttagtctccc ctggagctgg gctgcagtgt |
| 71461 | cactgttgac cactaggcct ctccctgccc cagagcacag ttttggaatg ttgaggtttc |
| 71521 | aggggcttta actttaaaga tgggcccctc cagccgggca cattggctca tgcctgtaat |
| 71581 | cccagcactt tgggaggctg ggatcaggag ttcgagacta gcctggccaa catggtgaaa |
| 71641 | ccccatctct actaaaaata caagctagct gaatgtggtg gcgggagcct gcaattctag |
| 71701 | ctacttggga ggctgaggca ggagaatcgc ttgaacccag gaggcagagg ttgcagtgag |
| 71761 | ccaagattgt gccattgtat tccagcctgg gcaacaagag tgagagcaag actccatcta |
| 71821 | aaaaaaaaaa aaaagatggg ctcctccaag ccaccctcac ttagggtaaa cacctgtagc |
| 71881 | ccagagaagc tgtcactggt tcacagcccc acagcaggct aaaggcaaac ctagagaggg |
| 71941 | aaccccagag tcctgggatg ctttaagtct acctgactgg actccaggct tggcaggagc |
| 72001 | aagacaacct atgctctcct ctgctcctcc tctggggcag gtcagatgtg gaggcactga |
| 72061 | agcgagagct gcaggtgcta tcggagcagt actcgcagaa gtgcctggag attggggcac |
| 72121 | tcatgcggca ggctgaggag cgcgagcaca cgctgcgccg ctgccagcag gagggccagg |
| 72181 | agctgctgcg ccacaaccag gtgggcctgg ccccaggttg gggggacacg ggtgggtccc |
| 72241 | ggcacccctc ccctgaccac cgtgcctctc ccaggagctg catggccgcc tgtcagagga |
| 72301 | gatagaccag ctgcgcggct tcattgcctc gcagggcatg ggcaatggct gcgggcgcag |
| 72361 | caacgagcgg agttcctgcg agctagaggt gagtgtcctc actagcacca ggcagcccag |
| 72421 | tggttctcgg ggcccggggc tatggggcac ccccgccata ggctgggtat cacctgtggc |
| 72481 | aggaaagcca agtctcccag tggctgggcc agcctgacta ggctagaaca cctactgtgc |
| 72541 | atccagtagc cagcattctg ccctcccacc tgcattgtgt cacctacctg ccgtgtacca |
| 72601 | tagcaaatca ctccactttt ctgagtccca gtagctcatc tgtaaaatgg caccagcacc |
| 72661 | ttccttactg ggaaatattg gggtaagaaa atatgtgtgt atgtgtgtga tgccagtatc |
| 72721 | actgtagtat tttctttctt tttctttctt tctttttttg agacagagtc tctctctgtc |
| 72781 | acccaggctg gagtgtagtg acacgatctc agttcactgc aacctctgcc tccctggttc |
| 72841 | aagcgattct cctgcctcag cctcccaagt agctaggatt acaggcctgc accaccacac |
| 72901 | ccagctaatt ttttatattt ttggtagaga caagtttcac tatgttggcc aggctggtct |
| 72961 | cgaactccgg acctcaagtg atctgcctac cttggcctca caaagtgctg ggattacagc |
| 73021 | atgagccacc acacccggcc ttagtattta tttctttact tttttttttt ttttgagaca |
| 73081 | gagttttgct gttgttgccc aggctacagt gcagtggcgc gatctcggct caccacaacc |
| 73141 | tccgcctccc aggttaaaac gattctcctg gccgggcgcg gtggctcacg cctgtaatcc |
| 73201 | cagcactttg ggaggccgag gcgggcagat cacgaggtag gagatcaaga ccatcctggc |
| 73261 | taacacagtg aaaccccgtc tctactaaaa atacaaaaaa attacccggg cgtggtggcg |
| 73321 | ggcgcggtgg cgggtgcctg tagtcccagc cactccggag gctgaggcag gagaatggca |
| 73381 | tgaacctggg aggcggagcg tgcagtgagc cgagatcgtg ccactgcact ccagcctggg |
| 73441 | tgacagagcg agactccgtc tcaaaaaaaa aaaaaatatt aaaaaaaaaa agcgattatc |
| 73501 | ctgcctcagc ctcccaagta gctaggatta caggcatgtg ccacctcgcc tggataattt |
| 73561 | tgtattttta gtagagacag ggtttttcca tgttggtcag gctcttctcg aactcccaac |
| 73621 | ctcaggtgat ccgcccactt cggcctctca aagtgttggg attacaggcg tgagccaccg |
| 73681 | tgcccagccg atattttatt tctctttttt tttttgagac ggagtcactc tgtcacccag |
| 73741 | gctggagtgc agtggcacca tctcggctca ctgcaagctc cgcctctcgg gttcatgcca |
| 73801 | ttctcctgcc tcagcctccc gagtagctgg gactacaggc acccgccacc acacctggct |
| 73861 | aattttttgt atttttagta gagacggggt ttcaccatgt tagccgggat ggtcccaatc |
| 73921 | tcctgacctc gtgatccgcc cgcctctgcc tcccaaagtg ctgggattac aggcgtgagc |
| 73981 | caccgctcct ggccccaata ttttatttct tcaacaaaca cttaggtgag gctcactctg |
| 74041 | tacctagaaa ttctggaagc cctttttgtc tgttaactca tctaatcttc ctgacagctc |
| 74101 | catacattag ctactatgac tgtccccatt tacagatgag gaaactgagg cacaggaagg |
| 74161 | tcaagtacct taccaaagct tttatagctg gactgggatt tgaaccaggc agtctggctc |
| 74221 | cagtctgagc ttttaagcct ccccagtcct ggctgaactt gtttcctcct tggtcaagtc |
| 74281 | agcagcacct agccctcggg gttggggagg ggttaatgag gtgccttgtg gagtggttca |
| 74341 | gcctgctcag gtttatgtag ggcttctttt catccatctc actcccgagg tgagagcctg |
| 74401 | gtgctgcatg agggctgcag cagacttgac cgtgagatat ccactcacac gggctggaca |
| 74461 | ggggtgagag taagggaagg caaagcaggg gaatcggaga gggcttcctg gaggagtccg |
| 74521 | cctccaggat gtagagggtt tttgtgcaga taggggctgc attctagggg cctgaggcag |
| 74581 | agagaacccg ggctgcaggg cactatgggc cagggtagct ctggcttctg gccctgggtc |
| 74641 | agtccagcac ctatatcccc aggtgctgct tcgcgtaaaa gaaaacgaac tccagtacct |
| 74701 | aaagaaggag gtgcagtgcc tccgggacga gctccagatg atgcagaagg taggtccttc |
| 74761 | cgctgggctg ggggccgtcg gggactctgg agccatctgg atgccatcct gtgagcacct |
| 74821 | gctctgtgcc aagccctcca ctcgcttcat ccttcctcag gctctcctgt gcttctccca |
| 74881 | tgtaggtgtc atcatcccca ttcactgaca gggaaactga gactaagaaa ggggaagtga |
| 74941 | cttccccaag gctgtacttg gcttctgttt atttagcatt atttaattta ttgattatta |
| 75001 | ttgagcacct actatatcct gggcactgtg ctaggtgctg ggaagacaga tgtgaacaaa |
| 75061 | ataaccccaa atctctgctg tggggagctt gcactccagt gagaataacc acgttgctag |
| 75121 | gagttgggtg ggtcagggtt cagcccaggt ctgagtctgc agcccgcctg gcccaccctt |
| 75181 | ggctgctatg tcactgcctg gtgcgctctg tcagtttggg gcaggaagtg gacatgttgg |
| 75241 | tggctctgta agtgcacgtg agccagaccg tgtttaccgc acttgaagaa caggtggcgt |
| 75301 | gaactcacag gaagggcccg agcacccagc caggctgacc tggttctcat cccagccact |
| 75361 | cactgccctg cggtcttggt caaaatcttc tcccccgaaa caggatgagg atgacaatga |
| 75421 | cgcctgtgtc cctgggtggt accagggagg tgggaggggt aagcccagaa cccacggcca |
| 75481 | tcttggggag ccacctggag ggatgaagcg aggtatctgc ggggaggtct ggctgctggt |
| 75541 | gctgcccatg tgcccggttg gcagggctgg agggagagac ttcatgccct catacctgcc |
| 75601 | tcctgccccc caggacaagc gcttcacctc gggaaagtac caggacgtct atgtggagct |
| 75661 | gagccacatc aagacacggt ctgagcggga gatcgagcag ctgaaggagc acctgcgtct |
| 75721 | tgccatggcc gccctccagg agaaggagtc gatgcgcaac agcctggctg agtagaggtg |
| 75781 | gatgccgagg cgtgtgccct gcagggtggg caggggctga ggctctccca cacccgggac |
| 75841 | tccctggacc accccagcca ggccacttcc ttcttctggc ctccaattcc cgttctgtaa |
| 75901 | aaaggacaat gaaaccagca acacggggtt gttgcagaga tcccatcaga cccgggccac |
| 75961 | aggctgcttc atcagcttaa gcctgttcct ccagagctgg gcggcacagt gcagagccac |
| 76021 | agcctactca gtgcaccccc cttcttgggg ctggaggcaa atgcagcgtg cacatccctg |
| 76081 | acccccacag tgaatctcca ctgagcttca cacacacaca tcgcacgctg aggccgggct |
| 76141 | tctatcccag ttagtcttaa cactccttct tgacttagca gggctcaaag tggttggttg |
| 76201 | gttggttggt tggttggttg gttggttggt tggttggttt tggttgcttt gagaaaggtc |
| 76261 | ttactctgac acccaggctg gagtgcagtg gtgcaatcac ggctcactgc agcctcaacc |
| 76321 | tcctaggctc aagggatcct cccacctcag ccttctgagt agctgggacc acaggccctc |
| 76381 | accaccatgc ccagataatt tttgcacttt ttgtataggt ggggtttcgc cgtgatttcc |
| 76441 | caggctggtc tcgaactcct gggctcaagc aatacacctg cctcagcctc ccaaaattct |
| 76501 | gagattacag gtgtgagccg ctgcacctgg ccaaagtgtt cttatttttg ctttttcaac |
| 76561 | gccacatcta cctggagcat cctctttctg ataagtcctc atggacttcc tatggcatgc |
| 76621 | aggagaggcc accctatggc tgagctgctt gggaaggagc caggaagagc ggatctggct |
| 76681 | gtaccttagg ggctgagagg tggtggaagg acccactcag cacccttgct tggccttggg |
| 76741 | gtggcctcgc agcccctcag cccaggcctc agccctgccg caccttgtct ttcaggtccc |
| 76801 | gcccagctgc agaccctcca ggctggagga ccagccgccc tccttccctc ctggatggaa |
| 76861 | gtaaaaagcc aagctttctc cccaccctct gtgggccaca cgtgcacttg cacccaccac |
| 76921 | acacacacac acacacacac acacacacac agacacacag acacatacgc acacacgtgc |
| 76981 | acacatgtac acacggatac acacacacac acacacactg catatctgag cgcgcccctc |
| 77041 | gcactgggtc tcaccttgca ccttcttcag gattttatat gtgaagagat ttttatatag |
| 77101 | atttttttcc tttttttcca aaacacttta tactttaaaa aaaaaaaaaa aaagcaattc |
| 77161 | ctggtggctg tgtgcctcca accctggtcc ccctctgtct ccagccaccc tctgcttggg |
| 77221 | cttctgagct ggtggccctg gcccagaggt ctggcggagg cccaggcagc agccatggcg |
| 77281 | gggtgtctct acaggggaga ggcgggagcc tgccaccctc ttcctgccct acctcctact |
| 77341 | aacacttcct gccccatttg gacccgtacc atggggctca ggacagaggg agctagcagc |
| 77401 | tggcctccat ggccccacag cctccttcga ggctgtgctg ggtgcagaac cgccagagcc |
| 77461 | acccaaaagg tgtttctctt ctgctccctg aacctcttaa cttaataaaa cgttccagca |
| 77521 | gctctggtgt cctagatggc tggcagaaca ggaatggaga ttggggtttc ttgaagtggc |
| 77581 | ttccccactc acaccctacc cacaccccac ccttcctaaa gcagcggcct ctaggcttct |
| 77641 | gagggtgggg ctgaaaatcc aaggtctccc ttagtacaga ctgtgacgcc cccagtgtgg |
| 77701 | cttgcaggct agtggcagcg gaagcatgtg ggaaatagca agtccagtcc caccccaacc |
| 77761 | tactgaacca gcgtctgcat tttaacaggg tgccccagtg attcacgtga ccttcaaagt |
| 77821 | ctgaggagcc ctggagtagg gcccagggcc caggcctgag agagaggcct ggggctaaga |
| 77881 | ctagccctga ccatgacctt gggcaagtca cacccctcac tgagcctcag tttgcttctc |
| 77941 | catcaaatgg gtgtttttct ttcagtccca gtcctctcct gaggcttttc ccagaggtca |
| 78001 | tgcccagccc tgggcagggg tgagggcagg gttgtggctg ccaggcacag gtccagcggg |
| 78061 | ctgggagtcc tcaccatggc tggctgtgct gattatggtt gcatggggct gggaagaggt |
| 78121 | cccatttctg agccacagaa acaggccaca tccagtaggg gtcctggaag gctgtgagaa |
| 78181 | cccagaggag accctgaccc agcctgcagg tagaagactg cctttggagg cagctttgaa |
| 78241 | agatgactct tccagatgga agaatcagga agggccttcc cacgtggagg caccagcagg |
| 78301 | agcaaacgtc cctggtgtgt tcaggcaaag agccacagga gagtgacctc gtggagtggg |
| 78361 | aagagattgt ttcccattcc cttgccaggg attggttgag gaatggacaa ggcttgcagt |
| 78421 | tcacgcaagc cagtgaaatg cgaggggaag tcttgggagt ggggtggagg aggtcatctg |
| 78481 | ggaagggtgt ccttggtctt aaaaagaggc acaagaggcc gggcgcggtg gctcttgcct |
| 78541 | attatcctag cactttggga ggccaaggca gggggatcac ttgaggtcag gagttcgaga |
| 78601 | ccagcctggc caacatggtg aaaccccgtc tctactaaaa atacaaaaaa ttagccagac |
| 78661 | gtggtgccaa gcacctgtaa tcccagctac tcaggaggct gaggcaggag aatcacttga |
| 78721 | acccaggagg cagaagttgc agtgagccaa gatcgcgcca ctgcactcca gcctgtgtga |
| 78781 | caagggcgaa actccatctc aaaaaaaaag ggggagggtg gcgcaaggag aggacacctc |
| 78841 | tctcctggcc ctgtcgccat cttccctcat caatagctaa aaatggcaaa gaagaaagag |
| 78901 | ccaggacccc gtgccatcaa atcctccggc cttgtgctgc cctgtctcgg cactgcttgc |
| 78961 | cttaggagat caggagtgtt cctagccact gggagatggg atgcctgcca ctggcagctc |
| 79021 | tgccgtccat cctcaccatc ccaccgtccc cccaagacag ctctccatcc catcctctgc |
| 79081 | ctcccttcta gcctcaacct aactcagggc tcccccgtct cacacctggg ttgcaggaac |
| 79141 | atcctcttca ccaacccccc tcccatccct cctcagggct gcctagggca gctacaaaaa |
| 79201 | ccaggccagc ctctgaaagg tgctccacat ctcattaaaa accgtgaaat cgcactgccc |
| 79261 | cactatcaga atagctcaga ggagaaggtc tgccagtacc aagtgctggt ggggatacgg |
| 79321 | agaagagcag ctcccaggcg ctgctggtgc aaatgtgctt tgttgcaccc acggcaggaa |
| 79381 | actgaccagc ttctcatcaa gttaaatacg catctaccct atggcctagc atttccactc |
| 79441 | ttgcttacac atccaggaga aatgagtcct tacatgcaca aaaggatgag taccgtaata |
| 79501 | ctcacatcag caaataaaca atacagctgt gtgtcagtag tagaatgaat aaattgtggt |
| 79561 | cgattcata |

### Stereocilin

[0148] The STRC gene encodes stereocilin, a protein that is normally expressed in the inner ear and is associated with the stereocilia of specialized hair cells in the inner ear (see, e.g., Verpy et al., Nature 456: 255-258, 2008; and Zhang et al., J. Med. Genet. 44: 233-240, 2007). Stereocilia, which are about 10-50 μm in length, are important for hearing and balance. Stereocilia play a mechanosensing role in hearing. By bending in response to sound, they form a structure for mechanoreception of sound stimulation.

[0149] The human STRC gene is located on chromosome 15q15. It contains 29 exons encompassing ˜19 kilobases (kb) (Verpy et al., Nature Genetics 29(3): 345-349, 2001; NCBI Accession No. NG011636.1). The gene is tandemly duplicated on chromosome 15q15 in a telomere-to-centromere orientation, with the tandem copies located less than 100 kb apart on the chromosome. The coding sequence of the second copy is interrupted by a stop codon in exon 20, meaning that it is a “pseudogene” that encodes a nonfunctional truncated protein. (Hereinafter, references to “the STRC gene” mean the gene that does not have that stop codon in exon 20, while references to the “pseudogene” or the “STRC pseudogene” denote the gene that does have that stop codon in exon 20.) In some examples, the full-length STRC protein is a full-length wildtype STRC protein. The full-length wildtype STRC protein expressed from the human STRC gene is 1775 residues in length, and contains a signal peptide and several hydrophobic segments. When the signal peptide is cleaved off during processing of the wildtype protein, the resulting mature wildtype stereocilin protein is 1719 residues in length. In some embodiments, a full-length STRC protein can include a heterologous signal peptide positioned N-terminal to an amino acid sequence of a mature wildtype stereocilin protein.

[0150] Various mutations in the STRC gene have been associated with hearing loss (e.g., non-symptomatic sensorineural hearing loss). For example, a homozygous 1-bp insertion was identified in exon 13 in a consanguineous Pakistani family with autosomal recessive non-syndromic sensorineural deafness-16 (DFNB16) (Verpy et al. (2001). Another example found in a family with DFNB16 includes both a 4-bp deletion in exon 5 and a larger deletion encompassing exons 17-29. The two deletions were inherited from the father and mother, respectively. The 4-bp deletion was predicted to result in the translation of 5 out-of-frame amino acids and a premature stop codon in exon 5.

[0151] Additional exemplary mutations in a stereocilin gene detected in subjects having non-symptomatic sensorineural hearing loss and methods of sequencing a nucleic acid encoding stereocilin are described in, e.g., Verpy et al., Nature 456:255-259, 2008; Verpy et al., Res. Systems Neurosci. 519:194-210, 2011; Hofrichter et al., Clinical Genetics 87:49-55, 2015; and Mandelker et al., J. Mol. Diagnostics 16:639-647, 2014. Methods of detecting mutations in a gene are well-known in the art. Non-limiting examples of such techniques include: real-time polymerase chain reaction (RT-PCR), PCR, sequencing, Southern blotting, and Northern blotting.

[0152] An exemplary human wildtype stereocilin protein is or includes the sequence of SEQ ID NO: 34. Non-limiting examples of nucleic acid encoding a wildtype stereocilin protein are or include SEQ ID NO: 35 and SEQ ID NO: 36. As can be appreciated in the art, at least some or all of the codons in SEQ ID NO: 35 can be codon-optimized to allow for optimal expression in a non-human mammal or in a human.

[0153] In some embodiments of any of the compositions described herein, the STRC protein comprises a sequence that is at least 75% (e.g., at least 80%, at least 85%, at least 90%, at least 91%, at least 92%, at least 93%, at least 94%, at least 95%, at least 96%, at least 97%, at least 98%, at least 99%) identical to SEQ ID NO: 34.

Human Full-length Wildtype Stereocilin Protein
(Signal sequence shown in bold)
(SEQ ID NO: 34)
MALSLWPLLLLLLLLLLLSFAVTLAPTGPHSLDPGLSELKSLLSTLDQAPQGSLSRSRETTFLANISSSFE
PGRMGEGPVGEPPPLQPPALRLHDFLVTLRGSPDWEPMLGLLGDMLALLGQEQTPRDFLVHQAGVLGGLVE
VLLGALVPGGPPTPTRPPCTRDGPSDCVLAADWLPSLLLLLEGTRWQALVQVQPSVDPTNATGLDGREAAP
HFLQGLLGLLTPTGELGSKEALWGGLLRTVGAPLYAAFQEGLLRVTHSLQDEVFSILGQPEPDTNGQCQGV
FFLTLSLLGNLQQLLLWGVRHNLSWDVQALGFLSGSPPPPPALLHCLSTGVPLPRASQPSAHISPRQRRAI
TVEALCENHLGPAPPYSISNFSIHLLCQHTKPATPQPHPSTTAICQTAVWYAVSWAPGAQGWLQACHDQFP
DEFLDAICSNLSFSALSGSNRRLVKRLCAGLLPPPTSCPEGLPPVPLTPDIFWGCFLENETLWAERLCGEA
SLQAVPPSNQAWVQHVCQGPTPDVTASPPCHIGPCGERCPDGGSFLVMVCANDTMYEVLVPFWPWLAGQCR
ISRGGNDTCFLEGLLGPLLPSLPPLGPSPLCLTPGPFLLGMLSQLPRCQSSVPALAHPTRLHYLLRLLTFL
LGPGAGGAEAQGMLGRALLLSSLPDNCSFWDAFRPEGRRSVLRTIGEYLEQDEEQPTPSGFEPTVNPSSGI
SKMELLACFSPVLWDLLQREKSVWALQILVQAYLHMPPENLQQLVLSAEREAAQGFLTLMLQGKLQGKLQV
PPSEEQALGRLTALLLQRYPRLTSQLFIDLSPLIPFLAVSDLMRFPPSLLANDSVQQGYRGSEENSLEEDK
GLRPMTPRSLAAIRDYSPGMRPEQKEALAKRLLAPELFGEVPAWPQELLWAVLPLLPHLPLENFLQLSPHQ
IQALEDSWPAAGLGPGHARHVLRSLVNQSVQDGEEQVRRLGPLACFLSPEELQSLVPLSDPTGPVERGLLE
CAANGTLSPEGRVAYELLGVLRSSGGAVLSPRELRVWAPLFSQLGLRFLQELSEPQLRAMLPVLQGTSVTP
AQAVLLLGRLLPRHDLSLEELCSLHLLLPGLSPQTLQAIPRRVLVGACSCLAPELSRLSACQTAALLQTFR
VKDGVKNMGTTGAGPAVCIPGQQPIPTTWPDCLLPLLPLKLLQLDSLALLANRRRYWELPWSEQQAQFLWK
KMQVPTNLTLRNLQALGTLAGGMSCEFLQQINSMVDFLEVVHMIYQLPTRVRGSLRACIWAELQRRMAMPE
PEWTTVGPELNGLDSKLLLDLPIQLMDRLSNESIMLVVELVQRAPEQLLALTPLHQAALAERALQNLAPKE
TPVSGEVLETLGPLVGFLGTESTRQIPLQILLSHLSQLQGFCLGETFATELGWLLLQESVLGKPELWSQDE
VEQAGRLVFTLSTEATSLIPREALGPETLERLLEKQQSWEQSRVGQLCREPQLAAKKAALVAGVVRPAAED
LPEPVPNCADVRGTFPAAWSATQIAEMELSDFEDCLTLFAGDPGLGPEELRAAMGKAKQLWGPPRGFRPEQ
ILQLGRLLIGLGDRELQELILVDWGVLSTLGQIDGWSTTQLRIVVSSFLRQSGRHVSHLDFVHLTALGYTL
CGLRPEELQHISSWEFSQAALFLGTLHLQCSEEQLEVLAHLLVLPGGFGPISNWGPEIFTEIGTIAAGIPD
LALSALLRGQIQGVTPLATSVIPPPKFAVVFSPIQLSSLTSAQAVAVTPEQMAFLSPEQRRAVAWAQHEGK
ESPEQQGRSTAWGLQDWSRPSWSLVLTISFLGHLL
Human Wildtype Stereocilin cDNA
(SEQ ID NO: 35)
atggctctcagcctctggccoctgctgctgctgctgctgctgctgctgctgctgtcctttgcagtgactct
ggcccctactgggcctcattccctggaccctggtctctccttcctgaagtcattgctctccactctggacc
aggctccccagggctccctgagccgctcacggttctttacattcctggccaacatttcttcttcctttgag
cctgggagaatgggggaaggaccagtaggagagcccccacctctccagccgcctgctctgcggctccatga
ttttctagtgacactgagaggtagccccgactgggagccaatgctagggctgctaggggatatgctggcac
tgctgggacaggagcagactccccgagatttcctggtgcaccaggcaggggtgctgggtggacttgtggag
gtgctgctgggagccttagttcctgggggcccccctaccccaactcggcccccatgcacccgtgatgggcc
gtctgactgtgtcctggctgctgactggttgccttctctgctgctgttgttagagggcacacgctggcaag
ctctggtgcaggtgcagcccagtgtggaccccaccaatgccacaggcctcgatgggagggaggcagctcct
cactttttgcagggtctgttgggtttgcttaccccaacaggggagctaggctccaaggaggctctttgggg
cggtctgctacgcacagtgggggcccccctctatgctgcctttcaggaggggctgctccgtgtcactcact
ccctgcaggatgaggtcttctccattttggggcagccagagcctgataccaatgggcagtgccagggagtt
ttcttccttactctttccctcctaggtaaccttcaacagctgctcttatggggcgtccggcacaacctttc
ctgggatgtccaggcgctgggctttctgtctggatcaccacccccaccccctgccctccttcactgcctga
gcacgggcgtgcctctgcccagagcttctcagccgtcagcccacatcagcccacgccaacggcgagccatc
actgtggaggccctctgtgagaaccacttaggcccagcaccaccctacagcatttccaacttctccatcca
cttgctctgccagcacaccaagcctgccactccacagccccatcccagcaccactgccatctgccagacag
ctgtgtggtatgcagtgtcctgggcaccaggtgcccaaggctggctacaggcctgccacgaccagtttcct
gatgagtttttggatgcgatctgcagtaacctctccttttcagccctgtctggctccaaccgccgcctggt
gaagcggctctgtgctggcctgctcccaccccctaccagctgccctgaaggcctgccccctgttcccctca
ccccagacatcttttggggctgcttcttggagaatgagactctgtgggctgagcgactgtgtggggaggca
agtctacaggctgtgccccccagcaaccaggcttgggtccagcatgtgtgccagggccccaccccagatgt
cactgcctccccaccatgccacattggaccctgtggggaacgctgcccggatgggggcagcttcctggtga
tggtctgtgccaatgacaccatgtatgaggtcctggtgcccttctggccttggctagcaggccaatgcagg
ataagtcgtgggggcaatgacacttgcttcctagaagggctgctgggcccccttctgccctctctgccacc
actgggaccatccccactctgtctgacccctggccccttcctccttggcatgctatcccagttgccacgct
gtcagtcctctgtcccagctcttgctcaccccacacgcctacactatctcctccgcctgctgaccttcctc
ttgggtccaggggctgggggcgctgaggcccaggggatgctgggtcgggccctactgctctccagtctccc
agacaactgctccttctgggatgcctttcgcccagagggccggcgcagtgtgctacggacgattggggaat
acctggaacaagatgaggagcagccaaccccatcaggctttgaacccactgtcaaccccagctctggtata
agcaagatggagctgctggcctgctttagtcctgtgctgtgggatctgctccagagggaaaagagtgtttg
ggccctgcagattctagtgcaggcgtacctgcatatgcccccagaaaacctccagcagctggtgctttcag
cagagagggaggctgcacagggcttcctgacactcatgctgcaggggaagctgcaggggaagctgcaggta
ccaccatccgaggagcaggccctgggtcgcctgacagccctgctgctccagcggtacccacgcctcacctc
ccagctcttcattgacctgtcaccactcatccctttcttggctgtctctgacctgatgcgcttcccaccat
ccctgttagccaacgacagtgtacagcagggctacagagggtcagaggaaaacagtttggaggaagacaaa
gggttaagacccatgactcctcgcagcctggctgccatccgggattacagcccaggaatgaggcctgaaca
gaaggaggctctggcaaagcgactgctggccoctgaactgtttggggaagtgcctgcctggccccaggagc
tgctgtgggcagtgctgcccctgctcccccacctccctctggagaactttttgcagctcagccctcaccag
atccaggccctggaggatagctggccagcagcaggtctggggccagggcatgcccgccatgtgctgcgcag
cctggtaaaccagagtgtccaggatggtgaggagcaggtacgcaggcttgggcccctcgcctgtttcctga
gccctgaggagctgcagagcctagtgcccctgagtgatccaacggggccagtagaacgggggctgctggaa
tgtgcagccaatgggaccctcagcccagaaggacgggtggcatatgaacttctgggtgtgttgcgctcatc
tggaggagcggtgctgagcccccgggagctgcgggtctgggcccctctcttctctcagctgggcctccgct
tccttcaggagctgtcagagccccagcttagagccatgcttcctgtcctgcagggaactagtgttacacct
gctcaggctgtcctgctgcttggacggctccttcctaggcacgatctatccctggaggaactctgctcctt
gcaccttctgctaccaggcctcagcccccagacactccaggccatccctaggcgagtcctggtcggggctt
gttcctgcctggcccctgaactgtcacgcctctcagcctgccagaccgcagcactgctgcagacctttcgg
gttaaagatggtgttaaaaatatgggtacaacaggtgctggtccagctgtgtgtatccctggtcagcagcc
tattcccaccacctggccagactgcctgcttcccctgctcccattaaagctgctacaactggattccttgg
ctcttctggcaaatcgaagacgctactgggagctgccctggtctgagcagcaggcacagtttctctggaag
aagatgcaagtacccaccaaccttaccctcaggaatctgcaggctctgggcaccctggcaggaggcatgtc
ctgtgagtttctgcagcagatcaactccatggtagacttccttgaagtggtgcacatgatctatcagctgc
ccactagagttcgagggagcctgagggcctgtatctgggcagagctacagcggaggatggcaatgccagaa
ccagaatggacaactgtagggccagaactgaacgggctggatagcaagctactcctggacttaccgatcca
gttgatggacagactatccaatgaatccattatgttggtggtggagctggtgcaaagagctccagagcagc
tgctggcactgacccccctccaccaggcagccctggcagagagggcactacaaaacctggctccaaaggag
actccagtctcaggggaagtgctggagaccttaggccctttggttggattcctggggacagagagcacacg
acagatccccctacagatcctgctgtcccatctcagtcagctgcaaggcttctgcctaggagagacatttg
ccacagagctgggatggctgctattgcaggagtctgttcttgggaaaccagagttgtggagccaggatgaa
gtagagcaagctggacgcctagtattcactctgtctactgaggcaatttccttgatccccagggaggcctt
gggtccagagaccctggagcggcttctagaaaagcagcagagctgggagcagagcagagttggacagctgt
gtagggagccacagcttgctgccaagaaagcagccctggtagcaggggtggtgcgaccagctgctgaggat
cttccagaacctgtgccaaattgtgcagatgtacgagggacattcccagcagcctggtctgcaacccagat
tgcagagatggagctctcagactttgaggactgcctgacattatttgcaggagacccaggacttgggcctg
aggaactgcgggcagccatgggcaaagcaaaacagttgtggggtcccccccggggatttcgtcctgagcag
atcctgcagcttggtaggctcttaataggtctaggagatcgggaactacaggagctgatcctagtggactg
gggagtgctgagcaccctggggcagatagatggctggagcaccactcagctccgcattgtggtctccagtt
tcctacggcagagtggtcggcatgtgagccacctggacttcgttcatctgacagcgctgggttatactctc
tgtggactgcggccagaggagctccagcacatcagcagttgggagttcagccaagcagctctcttcctcgg
caccctgcatctccagtgctctgaggaacaactggaggttctggcccacctacttgtactgcctggtgggt
ttggcccaatcagtaactgggggcctgagatcttcactgaaattggcaccatagcagctgggatcccagac
ctggctctttcagcactgctgcggggacagatccagggcgttactcctcttgccatttctgtcatccctcc
tcctaaatttgctgtggtgtttagtcccatccaactatctagtctcaccagtgctcaggctgtggctgtca
ctcctgagcaaatggcctttctgagtcctgagcagcgacgagcagttgcatgggcccaacatgagggaaag
gagagcccagaacagcaaggtcgaagtacagcctggggcctccaggactggtcacgaccttcctggtccct
ggtattgactatcagcttccttggccacctgctatga
Human Wildtype Stereocilin cDNA - Codon Optimized
(SEQ ID NO: 36)
atggctctgtctctgtggcctctgctgctgctcctgttgctgcttctgctgctcagcttcgccgtgacact
ggctccaacaggaccccactctctggatcctggcctgagctttctgaagtccctgctgagcaccctggatc
aggctcctcagggcagcctgagcagatccagattcttcaccttcctggccaacatcagcagcagcttcgag
cctggcagaatgggagaaggacctgtgggagaacctcctccactgcaacctccagctctgcggctgcacga
ttttctggtcacactgagaggcagccccgactgggaacctatgctgggactgctgggagatatgctggccc
tgctcggacaagagcagacccctagagatttcctggtgcatcaggctggcgtgctcggaggactggttgaa
gttctgcttggagcactggtgcctggcggacctcctacacctacaagacctccatgcaccagagatggccc
cagcgattgtgtgctggctgctgattggctgcctagcctgctcctgcttctggaaggcacaagatggcagg
ccctggtgcaggttcagccttctgtggatcctaccaatgccaccggcctggatggaagagaagccgctcca
cactttctgcagggactgcttggactgctcacacctactggcgagctgggctctaaagaagccctttgggg
aggcctgctgagaacagttggagcccctctgtacgccgcctttcaagagggactcctgagagtgacacaca
gcctgcaggacgaggtgttcagcatcctgggacagccagagcctgacaccaatggacagtgtcagggcgtg
ttctttctgaccctgagcctgctgggcaacctgcagcaactgcttctgtggggcgtcagacacaacctgag
ctgggatgtgcaggcactgggctttctgtctggaagccctccacctccaccagcactgctgcattgtctgt
ctactggcgtgccactgcctagagcctctcagcctagcgctcacatcagccccagacagagaagggccatc
accgtggaagctctgtgcgagaatcacctgggacctgctcctccatacagcatcagcaacttctccatcca
tctgctgtgtcagcacaccaagcctgccacacctcagcctcatcctagcaccacagccatctgtcagaccg
ccgtttggtacgccgtttcttgggctcctggtgctcaaggatggctgcaggcctgtcacgatcagttcccc
gacgagttcctggacgccatctgcagcaatctgagcttctctgccctgtccggcagcaatcggagactggt
caaaagactgtgcgccggactgctgcctcctccaacatcttgtcctgagggactgcctcctgtgcctctga
ctcccgatatcttttggggctgcttcctggaaaacgagacactgtgggccgagagactgtgtggcgaagcc
tctctgcaagccgtgcctccatctaatcaggcctgggtgcagcacgtttgtcagggccctacacctgacgt
gacagcctctcctccttgtcacatcggaccttgcggcgagagatgtcctgatggcggcagctttctcgtga
tggtctgcgccaacgacactatgtacgaggtgctggtgcccttctggccttggctggctggccagtgtaga
atctccagaggcggcaacgatacctgtttcctggaaggactcctgggaccactgcttccatctctgcctcc
gcttggaccctctcctctgtgtcttacccctggacctttcctgctggggatgctgtctcagctgcctagat
gccagtctagcgtgccagctctggcccatccaaccagactgcactatctgttgcggctgctgaccttcctc
cttggacctggcgctggcggagctgaagctcaaggcatgcttggcagagccctgctgctgtcatccctgcc
tgacaactgcagcttctgggacgccttcagacctgaaggacgcagaagcgtgctgaggaccatcggcgagt
acctggaacaggatgaggaacagcctacaccaagcggcttcgaacccaccgtgaatcctagcagcggcatc
tccaagatggaactgctggcctgcttcagccccgtgctgtgggatctgctgcagagggaaaaaagcgtgtg
ggccctgcagatcctggtccaggcctatctgcacatgcctccagagaacctgcaacagctggtgctgtctg
ccgagagagaagctgcccagggattcctgactctgatgctgcagggaaagctgcagggcaaactccaggtg
ccacctagcgaagaacaggcccttggcagactgacagcactcctgctccagagataccccagactgacctc
tcagctgtttatcgatctgagccctctgatcccattcctggccgtgtccgacctgatgagattccctccta
gtctgctggccaacgactccgtgcagcagggatacagaggcagcgaggaaaacagcctggaagaggacaaa
ggcctgcggcctatgacacctagatctctggccgccatccgggattacagccctggaatgaggcccgagca
gaaagaggccctggctaagagactgctggctcccgagctgtttggcgaagttccagcctggcctcaagaac
tgctgtgggctgttctgcccctgctgccacatctgcctctggaaaacttcctgcagctgagcccacaccag
attcaggccctcgaggattcttggcctgccgctggactcggacctggacatgctagacacgtgctgagaag
cctggtcaaccagagcgttcaggacggcgaggaacaagtgcggagacttggacccctggcctgttttctga
gccccgaggaactgcagagtctggtgcctctgtctgaccctacaggccctgttgaaaggggcctgctggaa
tgtgccgccaatggaacactgagccctgagggcagagtggcctatgaacttctgggagtgctgagatctag
cggcggagccgttctgtcccctagggaacttagagtgtgggcacccctgtttagccagctgggcctgagat
tcctgcaagagctgtctgagccacagctgagggctatgctgcctgtgctccagggcacatctgtgacacca
gctcaagccgtcctgctgttgggcagactgctccctagacacgatctgtccctggaagaactgtgcagcct
gcacttgctgctgcctggactgtctcctcagacactgcaggccattcctcggagagtgcttgtgggagcct
gtagctgtctggcccctgagctgtctagactgagcgcctgtcaaacagccgctctcctgcagaccttcaga
gtgaaggatggcgtgaagaacatgggcaccacaggcgctggacctgccgtgtgtattcctggacagcagcc
cattcctaccacctggccagattgtctgctcccactgctgcccctgaaactgctgcagctggattctctgg
ctctgctggctaaccggcggagatattgggaactgccttggagcgaacagcaggcacagttcctgtggaag
aagatgcaggtccccaccaatctgacactgcggaatctgcaggctctcggcacacttgctggcggaatgag
ctgcgagttcctccagcagatcaacagcatggtggactttctggaagtggtgcacatgatctaccagctgc
caaccagagtgcggggaagcctgagagcttgtatttgggctgaactgcagcggcggatggccatgcctgaa
cctgaatggacaacagtgggccccgagctgaacggcctggactctaaacttctgctggatctccccatcca
gctgatggacagactgagcaacgagagcatcatgctggtggtggaactggtgcagagagccccagaacagc
tgctggcactgacacctctgcatcaagctgctctggccgaacgggcccttcagaatctggctcccaaagaa
acccctgtgtccggggaagtgctggaaacactgggacctcttgtgggcttcctgggcaccgagtctaccag
acagattcctctccagatcctgctgtcccacctgagccagctccagggattttgtctgggcgagacattcg
ccaccgaactcggatggttgctgctccaagagagcgtgctgggaaagcccgaactgtggtcacaggacgaa
gtggaacaggccggcagactggtgtttaccctgtctaccgaggccatcagtctgatccccagagaagcact
gggccctgaaacactcgagaggctgctggaaaagcagcagtcttgggaacagagcagagtgggccagctgt
gtagagaacctcagctggccgctaaaaaggccgcactggttgctggcgttgtcagacctgctgccgaggat
ctgccagagccagtgcctaattgtgccgatgtgcggggcacatttcctgccgcttggagcgctacacagat
cgccgaaatggaactgagcgacttcgaggactgtctgactctgtttgccggcgatcctggactgggaccag
aagaactgagagccgccatgggcaaagccaagcaactttggggacctccaagaggcttcagacccgaacag
attctgcagctcggccgcctgcttatcggactgggcgatagagagctgcaagaactgatcctggtggactg
gggcgtgctgtctactctgggacaaatcgacggctggtccaccacacagctgcggattgtggtgtccagct
tcctgaggcagtctggcagacatgtgtctcacctggacttcgtgcacctgactgccctgggctacacactg
tgtggactgcggcctgaggaacttcagcacatcagctcttgggagttcagccaggcagccctgtttctggg
aaccctgcatctgcagtgctccgaagaacaactggaagtgctcgcccatctgctcgtgctgccaggcggat
ttggccccatctctaattggggacccgagatcttcaccgagatcggcaccattgccgctggcatccctgat
ctggccctgtctgcactgctgagaggacagatccagggcgtgacaccactggccattagcgtgatccctcc
accaaagttcgccgtggtgtttagccccattcagctgtccagcctgacatctgcccaagccgtggctgtga
cccctgaacagatggcatttctgtctcccgagcagcggagagctgttgcttgggctcaacacgagggcaaa
gagagtcctgagcaacagggaagaagcaccgcttggggactgcaggattggtccagaccttcttggtcact
ggtgctgaccatcagctttctgggccacctcctgtga

[0154] A non-limiting example of a human wildtype stereocilin genomic DNA sequence is SEQ ID NO: 37. The exons in SEQ ID NO: 37 are: nucleotide positions 1-142 (exon 1), nucleotide positions 445-1230 (exon 2), nucleotide positions 1319-1343 (exon 3), nucleotide positions 2111-3368 (exon 4), nucleotide positions 4325-4387 (exon 5), nucleotide positions 4489-4605 (exon 6), nucleotide positions 4748-4914 (exon 7), nucleotide positions 5570-5756 (exon 8), nucleotide positions 5895-6010 (exon 9), nucleotide positions 6292-6424 (exon 10), nucleotide positions 6777-6959 (exon 11), nucleotide positions 7264-7302 (exon 12), nucleotide positions 7486-7653 (exon 13), nucleotide positions 7817-7882 (exon 14), nucleotide positions 8364-8489 (exon 15), nucleotide positions 9467-9525 (exon 16), nucleotide positions 10598-10721 (exon 17), nucleotide positions 10826-10938 (exon 18), nucleotide positions 13402-13537 (exon 19), nucleotide positions 13955-14151 (exon 20), nucleotide positions 14350-14440 (exon 21), nucleotide positions 14649-14805 (exon 22), nucleotide positions 15390-15559 (exon 23), nucleotide positions 17250-17405 (exon 24), nucleotide positions 17787-17929 (exon 25), nucleotide positions 18119-18267 (exon 26), nucleotide positions 18509-18605 (exon 27), nucleotide positions 18694-18841 (exon 28), and nucleotide positions 19041-19238 (exon 29). The introns are located between each of these exons in SEQ ID NO: 37, i.e., at nucleotide positions 143-444 (intron 1), nucleotide positions 1231 to 1318 (intron 2), nucleotide positions 1344-2110 (intron 3), nucleotide positions 3369-4324 (intron 4), nucleotide positions 4388-4488 (intron 5), nucleotide positions 4606-4747 (intron 6), nucleotide positions 4915-5569 (intron 7), nucleotide positions 5757-5894 (intron 8), nucleotide positions 6011-6291 (intron 9), nucleotide positions 6425-6776 (intron 10), nucleotide position 6960-7263 (intron 11), nucleotide positions 7303-7485 (intron 12), nucleotide positions 7654-7816 (intron 13), nucleotide positions 7883-8363 (intron 14), nucleotide positions 8490-9466 (intron 15), nucleotide positions 9526-10597 (intron 16), nucleotide positions 10722-10825 (intron 17), nucleotide positions 10939-13401 (intron 18), nucleotide positions 13538-13954 (intron 19), nucleotide positions 14152-14349 (intron 20), nucleotide positions 14441-14648 (intron 21), nucleotide positions 14806-15389 (intron 22), nucleotide positions 15560-17249 (intron 23), nucleotide positions 17406-17786 (intron 24), nucleotide positions 17930-18118 (intron 25), nucleotide positions 18268-18508 (intron 26), nucleotide positions 18606-18693 (intron 27), and nucleotide positions 18842-19040 (intron 28).

| Human Wildtype Stereocilin Gene (NCBI Accession No. NG_011636.1) | |
|---|---|
| (SEQ ID NO: 37) | |
| 1 | gccctgccct cacctggcta tcccacacag gtgagaataa ccagaactca cctccggtac |
| 61 | cagtgttcac ttggaaacat ggctctcagc ctctggcccc tgctgctgct gctgctgctg |
| 121 | ctgctgctgc tgtcctttgc aggtaagaag aacagtgagc agaactgggg atgaggagga |
| 181 | gggtggctgg aaaaagactt taagaatatg gaggtgaacc tgttagatag aaggacaaag |
| 241 | gagagaggca gagacttgtg caaaagggaa aaatgagggt taagaaaagc aggccaagac |
| 301 | ttactgtagg ccagtgaaag gggttcagct caccatcccc tcacctcatc tttagatcca |
| 361 | ggtagggaac tgtgctcagg ggcagggttg agtttgggct ctgtgttcct ctccttcagt |
| 421 | gacctctggt ttctctcctt acagtgactc tggcccctac tgggcctcat tccctggacc |
| 481 | ctggtctctc cttcctgaag tcattgctct ccactctgga ccaggctccc cagggctccc |
| 541 | tgagccgctc acggttcttt acattcctgg ccaacatttc ttcttccttt gagcctggga |
| 601 | gaatggggga aggaccagta ggagagcccc cacctctcca gccgcctgct ctgcggctcc |
| 661 | atgattttct agtgacactg agaggtagcc ccgactggga gccaatgcta gggctgctag |
| 721 | gggatatgct ggcactgctg ggacaggagc agactccccg agatttcctg gtgcaccagg |
| 781 | caggggtgct gggtggactt gtggaggtgc tgctgggagc cttagttcct gggggccccc |
| 841 | ctaccccaac tcggccccca tgcacccgtg atgggccgtc tgactgtgtc ctggctgctg |
| 901 | actggttgcc ttctctgctg ctgttgttag agggcacacg ctggcaagct ctggtgcagg |
| 961 | tgcagcccag tgtggacccc accaatgcca caggcctcga tgggagggag gcagctcctc |
| 1021 | actttttgca gggtctgttg ggtttgctta ccccaacagg ggagctaggc tccaaggagg |
| 1081 | ctctttgggg cggtctgcta cgcacagtgg gggcccccct ctatgctgcc tttcaggagg |
| 1141 | ggctgctccg tgtcactcac tccctgcagg atgaggtctt ctccattttg gggcagccag |
| 1201 | agcctgatac caatgggcag tgccagggag gtgagtgtgg ccagggctgg gactgggatg |
| 1261 | tggcagggca aggaaagtga aattggggta gttttcttcc ttactctttc cctcctaggt |
| 1321 | aaccttcaac agctgctctt atggtaagta acaggagacc agttctgagg gattgggcct |
| 1381 | ggaaaatctg gaggtgaaga gctgaagacc tcagcctcta gagaggaaaa ctgatgggag |
| 1441 | gagtgtagtt tagtggtttt ggggtgtgac tgtctgggtt ggtgtcccag ctccacctct |
| 1501 | tcctagccat atgaccttga gcaggttaca tagtctttct atacctcagt ttccccattt |
| 1561 | ataaaatgag aatgataata ttagttacca cagagttgtt gcacccggtt aaatgagttg |
| 1621 | atactgtgta tgcaaacgac ttaaaaccgt gctggcacat agcgcttaat aatgttagct |
| 1681 | agtaaagatg ggatttggaa aataaggaca cagctggatt cctctacccc cttactactt |
| 1741 | cagtacaaca atgccagaca gtagttagac atattgagtt gctgagcaga tttcctaaca |
| 1801 | tgaggcccgc tgagggttgt gtttaagcta tctaaaagca tacgaagaaa ggagacagaa |
| 1861 | gggggccagg tggacagaaa gaattccaac tggggcttct cctaggtgat tttggacctt |
| 1921 | ggcagggcag ctttctcttt tttgccccgt tgcagcattt caaccagtaa cgcctaaact |
| 1981 | ctcagggacc tcgcttgtag aaaagcctat gcttgccatg ccccttgagg gctctgagtc |
| 2041 | agggtcagaa tcttcagctg gaggaaatgt gaactgacca gatcctgcct gctcctccct |
| 2101 | ctgcacccag gggcgtccgg cacaaccttt cctgggatgt ccaggcgctg ggctttctgt |
| 2161 | ctggatcacc acccccaccc cctgccctcc ttcactgcct gagcacgggc gtgcctctgc |
| 2221 | ccagagcttc tcagccgtca gcccacatca gcccacgcca acggcgagcc atcactgtgg |
| 2281 | aggccctctg tgagaaccac ttaggcccag caccacccta cagcatttcc aacttctcca |
| 2341 | tccacttgct ctgccagcac accaagcctg ccactccaca gccccatccc agcaccactg |
| 2401 | ccatctgcca gacagctgtg tggtatgcag tgtcctgggc accaggtgcc caaggctggc |
| 2461 | tacaggcctg ccacgaccag tttcctgatg agtttttgga tgcgatctgc agtaacctct |
| 2521 | ccttttcagc cctgtctggc tccaaccgcc gcctggtgaa gcggctctgt gctggcctgc |
| 2581 | tcccaccccc taccagctgc cctgaaggcc tgccccctgt tcccctcacc ccagacatct |
| 2641 | tttggggctg cttcttggag aatgagactc tgtgggctga gcgactgtgt ggggaggcaa |
| 2701 | gtctacaggc tgtgcccccc agcaaccagg cttgggtcca gcatgtgtgc cagggcccca |
| 2761 | ccccagatgt cactgcctcc ccaccatgcc acattggacc ctgtggggaa cgctgcccgg |
| 2821 | atgggggcag cttcctggtg atggtctgtg ccaatgacac catgtatgag gtcctggtgc |
| 2881 | ccttctggcc ttggctagca ggccaatgca ggataagtcg tgggggcaat gacacttgct |
| 2941 | tcctagaagg gctgctgggc ccccttctgc cctctctgcc accactggga ccatccccac |
| 3001 | tctgtctgac ccctggcccc ttcctccttg gcatgctatc ccagttgcca cgctgtcagt |
| 3061 | cctctgtccc agctcttgct caccccacac gcctacacta tctcctccgc ctgctgacct |
| 3121 | tcctcttggg tccaggggct gggggcgctg aggcccaggg gatgcbgggt cgggccctac |
| 3181 | tgctctccag tctcccagac aactgctcct tctgggatgc ctttcgccca gagggccggc |
| 3241 | gcagtgtgct acggacgatt ggggaatacc tggaacaaga tgaggagcag ccaaccccat |
| 3301 | caggctttga acccactgtc aaccccagct ctggtataag caagatggag ctgctggcct |
| 3361 | gctttagtgt gagtgctctg ccagagggaa agctcctaga acagtgagaa ggccctccag |
| 3421 | gggaattcct cgaatactca gaggcagtag tgtggggtag tagttgaagc acacagctct |
| 3481 | agagtcagac aggcttggat tcatatcttg gttctgtgac cagccttgaa tgagttattt |
| 3541 | aacttctctg agcaatattt ttctcgtctc atttataaac tagggatgat aatggtatat |
| 3601 | gagataatac atgcbgtggg cttagcacag tgcatgatac acaaacatgc aataaatatt |
| 3661 | accttgttat tcttttgggc tctttgactc tctcactttc tgcaccagaa agaaaaagga |
| 3721 | tcaagttaga ggactctaaa tttttcccct agagagtgag aattggaggc tggcagaata |
| 3781 | caggaagata aggtaggaat gagaaagatt cagggacact accaatcaga agactttggt |
| 3841 | tctaggttca actgtgccac aaattagtgt gatcttaggc aagcaatttc atttagtttt |
| 3901 | tctgggcttc agtttttagt ctgtagaatg gaggggtgag aatatgttaa acaccataat |
| 3961 | taattcactg agtgcctatt atatgcaagg cactttgcta ggttctgtag gatatataaa |
| 4021 | gatttcttac tccatgttgg ggccaccttt ttcaaaccct gggcccagta aaatggaatt |
| 4081 | agatagtctc atagtatttg gttcaggtct acaagtatta attgagccaa ctatggacct |
| 4141 | ggcatgggag agggtacaag agaaattaga gatatgatcc cggacctaaa agagcttaat |
| 4201 | atctgaagaa tcacacttga gatgatggac aagcatccca gcaagtggag ctggaatgcc |
| 4261 | tgggggagct gcaggagaga cagagaagac agctctgttg gcatattgtc tttcttccca |
| 4321 | ccagcctgtg ctgtgggatc tgctccagag ggaaaagagt gtttgggccc tgcagattct |
| 4381 | agtgcaggta acaggtggag ggcacatggg tgggcbgggt gacagccatg gctggaggtc |
| 4441 | cctgccccgt gaggtgaggc catacccacc atgacctcct attcgcaggc gtacctgcat |
| 4501 | atgcccccag aaaacctcca gcagcbggtg ctttcagcag agagggaggc tgcacagggc |
| 4561 | ttcctgacac tcatgctgca ggggaagctg caggggaagc tgcaggtgag cactgagaaa |
| 4621 | ggggagcaag ggcacctgga gcctagtgtt cagagggctt gctttagtgg gaggaggaac |
| 4681 | tccagagagg aaatggcagg gatactgagc atctccagag gcagaatcca ttcctgtgcc |
| 4741 | cctacaggta ccaccatccg aggagcaggc cctgggtcgc ctgacagccc tgctgctcca |
| 4801 | gcggtaccca cgcctcacct cccagctctt cattgacctg tcaccactca tccctttctt |
| 4861 | ggctgtctct gacctgatgc gcttcccacc atccctgtta gccaacgaca gtgtgtaagg |
| 4921 | ttcttgcact actcctcctg ctcctgtcac ggtcaggcca accgcatcca cctggagcag |
| 4981 | ccccttccgg agctcctctc tgtttttttc tttcatgcca gataggcaat gtgccaacat |
| 5041 | cgtagcaagg tttgagagag gcacatctca cgcctgagtg tgaaaaccca atcattatgc |
| 5101 | taatgaacta caaaaggatc agagagctcc tctctattaa aaccagggag aggatgggcg |
| 5161 | tggtggctca tgcctgtaat cccagcacgt tgggagcccg aggcaggtgg atcactaggt |
| 5221 | ccgcctagtg agttcgagac cagcctggcc aatatggtga aaccccgtct ctattaaact |
| 5281 | acaaaaatta gccaggcatg gtggtgggcg cttgtagtcc cagttactct ggaggctgag |
| 5341 | gcaggaggat agcttgaacc tgggaggcag aggttgcagt gaaccaagat cgtgccactg |
| 5401 | cactccagcc tgggtgacag agcgagactc cgtcttaaaa aaaacaaaaa acaaaacaaa |
| 5461 | acaaaaaaac agggagagtc tccttcctat ctagacagca gggctacaga gggtcagagg |
| 5521 | aaaacagttt ggaggaagac aaagggttaa gacccatgac tcctcgcagc ctggctgcca |
| 5581 | tccgggatta cagcccagga atgaggcctg aacagaagga ggctctggca aagcgactgc |
| 5641 | tggcccctga actgtttggg gaagtgcctg cctggcccca ggagctgctg tgggcagtgc |
| 5701 | tgcccctgct cccccacctc cctctggaga actttttgca gctcagccct caccaggtat |
| 5761 | gagaatcatc ttctttactt gactggccca tcttctgcta gtggggacaa agagtcaatg |
| 5821 | gcatgtctct cagtggcccc tccctgcaag aaccctatag tgaccccagt gcgagctaac |
| 5881 | cttccccatc tcagatccag gccctggagg atagctggcc agcagcaggt ctggggccag |
| 5941 | ggcatgcccg ccatgtgctg cgcagcctgg taaaccagag tgtccaggat ggtgaggagc |
| 6001 | aggtacgcag gtgagttgtt gtgggatcag taaccaaggc aagagtggaa gaggtagaga |
| 6061 | gaggaaggca cagcbgtcac gcbgggtcgg tgttctagga agaaaggggc aagagagtag |
| 6121 | gcagtggcct caggcagcat agagttccag gagagaggtc tatagatggt gcccctgtgt |
| 6181 | agtggtgtag tgtcagagtg cccagtgtat gtacccatac catctgctgc caggcctgcc |
| 6241 | ttagtgctag tcttggggac cacacaaagg tcagcttcat gccctcctca ggcttgggcc |
| 6301 | cctcgcctgt ttcctgagcc ctgaggagct gcagagccta gtgcccctga gtgatccaac |
| 6361 | ggggccagta gaacgggggc tgctggaatg tgcagccaat gggaccctca gcccagaagg |
| 6421 | acgggtgagc ccctcagcac aagcctacaa gactttaggc ttcccctggg tctgtgtgga |
| 6481 | tggctttccc attgtgtcaa cttgagcaca gtggtgccag cccccatccc acttttgcaa |
| 6541 | cctccattcc ttactccatg gccattctta cctgttacca cctcttcctg gcccttctct |
| 6601 | atctggtctg tagcacccca aacataccct ttgccatttt gaacctaatc tactccagtc |
| 6661 | caatccctag ttccaaaccc tagcccaggc cctgggaaat tcagatgtgg gattagagag |
| 6721 | gaagttcaag gttcatctgt cttttctctc cagtcctaaa ccttctttgg ttacaggtgg |
| 6781 | catatgaact tctgggtgtg ttgcgctcat ctggaggagc ggtgctgagc ccccgggagc |
| 6841 | tgcgggtctg ggcccctctc ttctctcagc tgggcctccg cttccttcag gagctgtcag |
| 6901 | agccccagct tagagccatg cttcctgtcc tgcagggaac tagtgttaca cctgctcagg |
| 6961 | tttgcctgtc tcactccctg gcatgtaccc tccatccccg cttgagcccc agtcaagaga |
| 7021 | atcccattca gggataaaag cagcccctcc tttccctggg tgaacagtag aggtaaactc |
| 7081 | tgtctgcagg aggacgcctt cattcccttt cctcagatca agaagggacc tgagtcactg |
| 7141 | aggatggtta ctagggatgg ttaagaggca gcgggaagtt ttggagggtt tgccttagga |
| 7201 | acccacttag gacctggctg ctgggtcctg agagcbgttg ttttcggtcc catcccaaca |
| 7261 | caggcbgtcc tgctgcttgg acggctcctt cctaggcacg atgtgagtag cagcaacttc |
| 7321 | tcagcctccc gccagaggtc tctatcctct tttaacctgg ctcctgcatc tgcccctcct |
| 7381 | ctctctccgc tcccctcata cttactgcct tgctgcattg tgattgttgt cttccccaac |
| 7441 | acccttccct tcttcttcag gcctcttgtc tctcttgctc tttagctatc cctggaggaa |
| 7501 | ctctgctcct tgcaccttct gctaccaggc ctcagccccc agacactcca ggccatccct |
| 7561 | aggcgagtcc tggtcggggc ttgttcctgc ctggcccctg aactgtcacg cctctcagcc |
| 7621 | tgccagaccg cagcactgct gcagaccttt cgggtatgag agtggcaagg aggatgagat |
| 7681 | aatcagggat accggctctt tctggttggg aggaaggcat cttccctgag gccagggaag |
| 7741 | gcctttcata cctccccact tacacacaca cacacacaca cacacacaca cacacacaca |
| 7801 | accaattctc atgcaggtta aagatggtgt taaaaatatg ggtacaacag gtgctggtcc |
| 7861 | agcbgtgtgt atccctggtc aggtaagtgt gagatctccc aactgagctc ctctccccat |
| 7921 | tctggggcag tttcatatgg ctggtgctac ctcccacact accctgcagt ggccctgaga |
| 7981 | gttctggtta gctctgtgcc cattagcagc cctccccagt gccagatgca ggacagcatg |
| 8041 | atccactcac attgtcctag actaatgtca aagctggaag ggcctgagaa atcttccagg |
| 8101 | ccacccaccc tgctttcaga tgaaaagacc aaggcbggga gaagctaagg gactttgttt |
| 8161 | gcctggtgcc taactagcag caacacttga ccacagcagc ctgcagtgtg aggctcttag |
| 8221 | gcgtttattg ctacagtggc aaatgccatt ccacttctgt cctagctttg gtccctttcc |
| 8281 | acccccatgg ttccttttct ctgagtgcta agtacagact ctctcaccta tcactacact |
| 8341 | gctataccca tcaccgccag cagcctattc ccaccacctg gccagactgc ctgcttcccc |
| 8401 | tgctcccatt aaagctgcta caactggatt ccttggctct tctggcaaat cgaagacgct |
| 8461 | actgggagct gccctggtct gagcagcagg taattctccc cacttaattt cagaacttcc |
| 8521 | tccctcaatg tagtctacct tctttaccta tcccttagcc ctatttggcc agcttatccc |
| 8581 | tactatcctt tatttgattg tttgagatac agtctcactc tgttgcccag gctgcagtgc |
| 8641 | agtggcatga tcagagttcg ctgtaacctc aaactcctga gctcaggcaa tctttctgcc |
| 8701 | tcagcctcct gaatagctag gacgacaggt ggttaccacc atgcctggct aatttttaaa |
| 8761 | tttttttttt gttttttgag atgaagtctt gctctgtcac ccaggcttga gtacagtggc |
| 8821 | acaagcttgg ctcactgcaa cctctgtctc ccgggttcaa gcgattctcc tgcctcagcc |
| 8881 | tcccgagtag ctgggactac aggcactccc cacaatgcct ggctaatttt ttttttgttt |
| 8941 | tagtagagac agggtttcac catattggcc aggctggtct cgaactgctg accttgtgat |
| 9001 | ctgcctgcct ctgcctctca aagtgctggg attacaggtg tgagccacca tgcccggcca |
| 9061 | atttttaaat tttttgtaga gacagacaat acaaaaatgt ggacactatg tggagacact |
| 9121 | atgttgaggt actatgctgt ccagattggt cttgaactcc tggcctcaag caatcctcct |
| 9181 | gccttggcct cccaaagtgc tgggattaca gacctgagcc actgcaccca gccccctagt |
| 9241 | atctcttata atgtgacttg cttttctttt tctttctcct tcccttttct ttcatttctt |
| 9301 | tctcactctc gagagaagag tgggcatctg ggagagtggg aggctggtgg gtcccacaga |
| 9361 | gtgaggaggc aggactgggt ccaaggcagt cctgcctctc cactctaggg ggtatccttg |
| 9421 | gacagtgtct cttctgggaa ggggctcgtc tttctttctc ttgtaggcac agtttctctg |
| 9481 | gaagaagatg caagtaccca ccaaccttac cctcaggaat ctgcagtgag taacttgtgt |
| 9541 | tgagcagtgc gctgaattcg accaacattt ttttgagtgc ttactatgtg ccaggcacca |
| 9601 | tgtgatatgg aatgggggat atagggatga atgatgcata gtccctgcct cgtggacgtt |
| 9661 | ctcctagcac ctccctttgc cctcctttcc ttccacagtg ccatgcctat cctgactaga |
| 9721 | gccaaaggac tcagaaaacc tggattcagg ttccagtcct gtcacctact tgtcctcttg |
| 9781 | ggcaagtcat ttaacgtccc tgtgtcagtt ttcccttctt taaatgagaa ttacaatggc |
| 9841 | accagcctca taggtagtta ctgtgaagat taaatgaggt aggtcatgta agatatttaa |
| 9901 | cacagtgttt ggtccattgt aaagtcccag tagtcatttg ctactgttag tttacttcag |
| 9961 | gatgacttca gaggcactgg ccaagcaaga ataaatagga ataagaaggt atcactttac |
| 10021 | ttacacccac attagaagaa caatgggctt cagaatcttt tttttttttt ttttttcgag |
| 10081 | acagtcttgc tctgttgccc aggctggagt gcagtggcgc gatttcggct cactgcaacc |
| 10141 | tctgcctccc aggttcaagc gattctcctg tctcagcctc tggagtagct gggattacag |
| 10201 | gaatgtgcca ccatacccag ctaatttttg tatttttagt agagatgggg tttcaccatt |
| 10261 | ttggccaggc tggtctcaaa ctcctgacct caggtgatcc acccgcctca gcctcccaag |
| 10321 | ggcttcagaa tctaagacat ggctctagtt tcagtttacc acatttctag cagaatgatg |
| 10381 | ttgggaatgt cacctgactt ccataaatcc ttattttctc ctctgataaa cagcagtgat |
| 10441 | gttatgggga gctgatgaga tatctatgta aaaacatttc tcaaaccata aattacggtg |
| 10501 | gatgaacatc tgtacttgtg ttgagagtac tgatatcaag gagcaaacag gctgttgtat |
| 10561 | gtgttgaatg agcctctccc cactcacaca cccacagggc tctgggcacc ctggcaggag |
| 10621 | gcatgtcctg tgagtttctg cagcagatca actccatggt agacttcctt gaagtggtgc |
| 10681 | acatgatcta tcagctgccc actagagttc gagggagcct ggtgagaggg ggtgcctgga |
| 10741 | ctttagtggg agcagggagg ctgggaccct aggtatagaa cccagctcct atgttctgct |
| 10801 | ctggcctcac actgcttccc tacagagggc ctgtatctgg gcagagctac agcggaggat |
| 10861 | ggcaatgcca gaaccagaat ggacaactgt agggccagaa ctgaacgggc tggatagcaa |
| 10921 | gctactcctg gacttaccgt aagtactgca gctagagata ttggcccctc agaaagctca |
| 10981 | atctggggtg aagatctgcc cttagggaat gccctggagg aggtagtttt tctgtctggt |
| 11041 | agttccctga cataatttat agcccaaagc agaggatttt attcaaagtt gctctatgta |
| 11101 | ttgactggtt cccagaatat gctccagcac agggcagctg agggtggcaa cactgtattg |
| 11161 | aagcctgcca agtaatctta caataaccta gtccacatta attgagattg agacagagca |
| 11221 | tctgaagtga gggaggcaat gctccaaatc tgccccagag gattgtagtt tgctcagggc |
| 11281 | actgtgttct tagtgcattc agaggagtag atcgagagaa aaatatatga aaaatgtgat |
| 11341 | aaataccttc aaatacctga ggggctatca agtagaaatt agattgtcat atttatgagt |
| 11401 | ggccccattg ggcaagacta agagtagtta acggagatca gatttttaca tagtataaga |
| 11461 | aaaactaagg tagtgagttc ctggtccttg gagcbgttcg agcctaagcc agatggcccc |
| 11521 | atggcaggaa tgttgtagag cacgttcata tacaggttgt gggaagaaaa ggctatagga |
| 11581 | acccaaggct cctccctacc catggagaaa tttattagta tgttactcat atgctgcttt |
| 11641 | tctcatttta cccctaccac caccccgttg ccatccgcac tgtaagtcag gataggaaaa |
| 11701 | tgcbggtgtt acagtcttcc tggggaatat ggagctgaag tggagtaaaa gcagttgact |
| 11761 | tcattcctac ttttttcttt tttttctttt tttttttttt tgagacagag ttttgctgtg |
| 11821 | tcaccaaggc tggagtgcag tgacgtgatc tcggctcact gcaacctcca tcttccaggt |
| 11881 | tcaagcaatt ctcctgcctc agtctcccga gtagcbggga ctgtaggtgt gcaccaccat |
| 11941 | gccaggctaa tttttgtatt tgttgtaggg acgagctttc accatgttgg ccaggctggt |
| 12001 | cttgaactcc tggcttcaag tgatctgccc acctcggctt cccaacattc ttatattttt |
| 12061 | ataggccttt ccacagattt cagctcttgt atgacttagc ccagttccag aactggtaat |
| 12121 | cctaggtagg gtacaggtta tcacctctga tttcgggtaa aagggattta tttatttatt |
| 12181 | tgtttattta tttatatttt tgagacagag tctcgctctg tcacccaggc tggagtgcaa |
| 12241 | tggtgccatc tcggctcact gcaacctctc cctctggggt tcaagcaatt ctcctgcctc |
| 12301 | agcctgctga gtagcbggga ttacaggcgc gtgccaccac acccggctaa tttttgcatt |
| 12361 | tttagtagag acggggtttc accatgttgc tcagggtggt ctcgaatttc tgaccctgtg |
| 12421 | atctgcctgc ctcggcctcc caaagtgctg ggattacagg catgagccac tgcgtccggc |
| 12481 | ctgtttttac ttttttttaa tgccattcag atctgtttaa atatgtgggt tctgtgagat |
| 12541 | aatttagaat cccaaggtta cagatgaggt gaaagatcct agaccatgca tcaaaaaact |
| 12601 | tgagtttctc atttgtgaaa gaaggataag agaaacacct attttgtctg ggtgcagtgg |
| 12661 | ctcatgccta taatcccagc atttggggag gccaaggtgg gtggatcacg gaggtcaggt |
| 12721 | gttcaagacc agactggcca acatggcaaa acaccatctc tactaaaaat acaaaagtta |
| 12781 | gcbgggcgtg gtggcacgtg cgtgtaattc cagctattcg ggaggctgag gcacgagaat |
| 12841 | tgcttgaacc tgggaggtgc gggttgcagt gaactgagat cgcagcacca ctgtgctcca |
| 12901 | gcctgagtga tggagtgagg ccaggtcttg ttgtaggatc aaatgagata acacctgaaa |
| 12961 | gaactttgta aattgtatag cacgtacaaa caagaaggga cctcttcaca agcagaggaa |
| 13021 | gggtggtcct gtggaaaaaa acgggaattg ggagtgagag acctcaacat ttgatctctg |
| 13081 | tgaacctcag ttttttaatc tataaaatgg ggaaatgtta atggtactta atatttggag |
| 13141 | cttttgagtc cattagatca ggtaggattg ttcgttattt ttttttttta ggaagactag |
| 13201 | aaatatgttg ctcccttttt ctcccccact caagcttgat ggtgggaatt ggccctggag |
| 13261 | ctgtttacta tcagttcctg tccagcttca ctaaatttgg tctggggtca catcttagct |
| 13321 | gcggactgtg gggttttgtg gtcccttctc gacttggccc agctccacct gaatcctgtt |
| 13381 | gttgtcaaat tgctgtaata ggatccagtt gatggacaga ctatccaatg aatccattat |
| 13441 | gttggtggtg gagctggtgc aaagagctcc agagcagctg ctggcactga cccccctcca |
| 13501 | ccaggcagcc ctggcagaga gggcactaca aaacctggta agagtccacc ctaccagact |
| 13561 | cagatttgct gccctgggca attcttgctc ctcagacaat gctctctgac tgtcccccaa |
| 13621 | ccctctactt cttgctttct tgctgccaaa cagattcctg tctacaaggc ctggcccctg |
| 13681 | ttttgcctct gggttctgtt ccttgataat atgcttcacg ttacttgtcc atacctcttg |
| 13741 | gagtccgaga aatctcttgg agtccacctc tcagtctttc tgcctgctcc tatctgggct |
| 13801 | cattgcttaa ggaagtgaac aaaggtagtg agcatcatag ggtgctgagc tgggagcagg |
| 13861 | agggagggaa ggttaggggg cttggtgtct tgatcaaggt gtctggtatt ctgagtcaga |
| 13921 | agtgcattgt ccaagttctg atgctcttct ccaggctcca aaggagactc cagtctcagg |
| 13981 | ggaagtgctg gagaccttag gccctttggt tggattcctg gggacagaga gcacacgaca |
| 14041 | gatcccccta cagatcctgc tgtcccatct cagtcagctg caaggcttct gcctaggaga |
| 14101 | gacatttgcc acagagctgg gatggctgct attgcaggag tctgttcttg ggtatggacc |
| 14161 | ttcgagaact tcagattcta actcattcta tacccagtcc ctcagccacc atcatcagtg |
| 14221 | gcagcctgtt ccatattctt aaggtcccct ggagccctgt gtccgaaatc ctagcatgtc |
| 14281 | ctcttttccc cttccttttc ctcacagttc cctcagctcc ccagcccccg attttcttcc |
| 14341 | tgtccccagg aaaccagagt tgtggagcca ggatgaagta gagcaagctg gacgcctagt |
| 14401 | attcactctg tctactgagg caatttcctt gatccccagg gtgagatgaa ggaagaaggg |
| 14461 | aagggagtaa atgcatagag gggactggtg agctggttat ggggacccgt ggccaaagag |
| 14521 | ggcaaaggat atgaagccta gatctggggg gagactgcaa aacagagaca ggactttgga |
| 14581 | cttagagcta tagcagcagg tcctgatctg tccagatctc cccactctcc ttctaccttc |
| 14641 | tcatgcagga ggccttgggt ccagagaccc tggagcggct tctagaaaag cagcagagct |
| 14701 | gggagcagag cagagttgga cagctgtgta gggagccaca gcttgctgcc aagaaagcag |
| 14761 | ccctggtagc aggggtggtg cgaccagctg ctgaggatct tccaggtgaa actacccaaa |
| 14821 | tacttatatg tccagcagga tgtacaggga gtatcaaacg gtctgggttc tacatgtgct |
| 14881 | cttccctggg actgggtttt ctaatttata aagcaaagag tttagaggga tgatcttcaa |
| 14941 | gcctcttgta gttctagaat tctgtagttc tgggagtttg taaactatta agttttcttt |
| 15001 | tagcccagaa cttccatttt cctgctctct cgtgtctgct ctagactcag ctctagctcg |
| 15061 | gctaagtgtg gagctctctg ctggggagat ccctagaagc tttgaaggag acattgtgag |
| 15121 | gctggagaac tgggttcaaa ttcagtgcta ccattaaatc tctgaataac atcctcagtc |
| 15181 | ttccatctat aaaagtcttg gcatctccaa tcacttcttg ttctattatc tcctaagccc |
| 15241 | tatacatatt actctgtaat actcctttga tccctatttc tcacagtgct ctatcctcca |
| 15301 | aaggttggaa gactcactct atctacagat atctctctgg gcatatttta ttactgcgct |
| 15361 | gacctcctgg ccctgccttc ccccttcaga acctgtgcca aattgtgcag atgtacgagg |
| 15421 | gacattccca gcagcctggt ctgcaaccca gattgcagag atggagctct cagactttga |
| 15481 | ggactgcctg acattatttg caggagaccc aggacttggg cctgaggaac tgcgggcagc |
| 15541 | catgggcaaa gcaaaacagg ttagggatgg agagccaact ggggttggcc atgaggaagc |
| 15601 | tatttgggtg tgatgtagga cacaaagaga atggagagtt ggatgagagg tgggggaagc |
| 15661 | aagagataga agagttagaa gatttgggtc acaagtagga ggtgaaggga gataaatatt |
| 15721 | gaggaaagag agctagtata atgaatagag ggacgaaagc agtggttacc aaattttaat |
| 15781 | gcatatcacg atcatcaagg gaacagattt ttttctttat ttttttttct ttcttaaaaa |
| 15841 | aataatggca tgcttcggct gggtgcagcg gctcacgcct ataatctcag aactttggga |
| 15901 | ggccaaggcg ggcagatcac gaggtcagga gatcaagacc atcctgtcta acacggcgaa |
| 15961 | acacggtctc tactaaaaat acaaaaaagt tagccgggca tggtggtgca cacttgttgt |
| 16021 | cccagctact tgggaggctg aggcaggaga atggcgtgaa cctgggaggg ggagcttgca |
| 16081 | gtgagccgaa gtcaagccaa tgcactccat cctgggtgac agagcaagac tccatctcaa |
| 16141 | aaaaaaaaaa aaaaaaaaaa ggcatgcttc atgaatttgc gtgttatcct tgcacaggcg |
| 16201 | ccatgcaaat ctctgtatca ttccaatttt ttggggtatg tgctgctgaa ctgagcatgg |
| 16261 | gaacagtgcc agtgccagat taccatgctt cactgactta ataaaaacct ttggggaggc |
| 16321 | tgggcgcagt gactcatgcc tgtaatcaca gcactttggg aggcggaggc aggtggattg |
| 16381 | cttgagccca ggagttagag accagactgg gcaacatggt gaaaccctgt ctctactaaa |
| 16441 | aatagaaaaa acattagctg ggtgtggcgg cacatgcctg taatcccagc tactcaggag |
| 16501 | gcbggggtag gagaatccca tgagtgcagg aggtggaggg tgcaatgtgc caagatcgca |
| 16561 | ccactgccct ccagcctggg tgtcagagca agaccctgtc tcataaatta aaaaataagc |
| 16621 | ctctggggga aagagtctag acatctgcat ctcctttttt tttttttttt tttttttttg |
| 16681 | agacagagtc tcactctgtc acccagcatc caggctggag tgcagtggtg tgatcttggc |
| 16741 | tcactgtaac ctctacatcc tgggttcaaa cgatcctcct gcctcagcct ctcaagtagc |
| 16801 | tgggactaca ggtgcaccac acctggctaa tttttgtatc tttggtagag atggggtttc |
| 16861 | actatgttgc ccaggatggt ctcgaacttc tgggctcaag caatcctccc acctcagcct |
| 16921 | cccaaagtgc tgggattaca gcbgttagcc actgtgctgg gccctaggca tctgttttaa |
| 16981 | taagcgtctc tgtgtctgat gcacataaaa gtgtggaact catggactag agttagtttg |
| 17041 | ctcttctttt ccactgattg taatgtcttt caaaacacct tagaggaact gtaaggcaac |
| 17101 | ggtctcattt tatagtggag gaaactaaag aaaaggcaaa tgatttacct agagttatac |
| 17161 | agctaagggc agaggcaaga cttaaaaccc agcagtatga ctcccaatcc actgcttttc |
| 17221 | cactcacatt gttcctgtct ttctcctagt tgtggggtcc cccccgggga tttcgtcctg |
| 17281 | agcagatcct gcagcttggt aggctcttaa taggtctagg agatcgggaa ctacaggagc |
| 17341 | tgatcctagt ggactgggga gtgctgagca ccctggggca gatagatggc tggagcacca |
| 17401 | ctcaggtaac acttttcctc ctccctacgg cttcccaaac acccatccca cagacccagc |
| 17461 | cctatagatc atctaaagcc caaggaattt ttttcctgtg accctacctg gtccttcttt |
| 17521 | ctatcttttg ttgatacccc atactagtga ccttcaggac tctgatttat tcactctgag |
| 17581 | gccctggaca cataatactg tctcctacct cttttcctgg aggcttcctc tttttctttc |
| 17641 | cttttctttt ctgagtcctc agccttcccc atgactcctt aggtcttaat agtaacagaa |
| 17701 | tataacccag taacacctat cacttccctg tccattaatt ctccataact ttcctccttc |
| 17761 | ccctcttctc ccacccccca ccccagctcc gcattgtggt ctccagtttc ctacggcaga |
| 17821 | gtggtcggca tgtgagccac ctggacttcg ttcatctgac agcgctgggt tatactctct |
| 17881 | gtggactgcg gccagaggag ctccagcaca tcagcagttg ggagttcagg tcatttgtga |
| 17941 | aggggctgag ggtggtggtg ctgaggtaaa ggtggactta ctggggaaag aaggatcatg |
| 18001 | aaggtctggt cccatggagg aagggaactc atttgaagcc atctcttcct ttgtctcatg |
| 18061 | accacagccc ctttcactga agccgaattc ttcttccttc cttcctactg ttctacagcc |
| 18121 | aagcagctct cttcctcggc accctgcatc tccagtgctc tgaggaacaa ctggaggttc |
| 18181 | tggcccacct acttgtactg cctggtgggt ttggcccaat cagtaactgg gggcctgaga |
| 18241 | tcttcactga aattggcacc atagcaggtg gggagctggg ccactgctgg tgcaagttgg |
| 18301 | tttggtttct ataccatggg tggactggat ggaagactgc cctgcaattc ttaaggtggg |
| 18361 | ggcctgaggg tgtttaaata aggggctaga gacatattgg ggaaggtcta tgatagggca |
| 18421 | ctttgggagt agttagagaa ggtctatagg tttgaagaga gggaaggtca gtctaagaca |
| 18481 | atgtttggat gccacttgct tcaacagctg ggatcccaga cctggctctt tcagcactgc |
| 18541 | tgcggggaca gatccagggc gttactcctc ttgccatttc tgtcatccct cctcctaaat |
| 18601 | ttgctgtaag tattaatgga ctggggtgac cacaggagag ccagggccca atggggacta |
| 18661 | catgcatgca ctgattccta cccctgccct caggtggtgt ttagtcccat ccaactatct |
| 18721 | agtctcacca gtgctcaggc tgtggctgtc actcctgagc aaatggcctt tctgagtcct |
| 18781 | gagcagcgac gagcagttgc atgggcccaa catgagggaa aggagagccc agaacagcaa |
| 18841 | ggtgagttcc cagctgcaca gcttgatcct ccatctcctg acccagaatc aaacccctaa |
| 18901 | tttggtgctg tctggctctt agagtgcacc cagggagatc cctggagtga aggagtctac |
| 18961 | aggcagagcg ctaatttcca agtatcaatg ctcctggaga gctgagttgt gatattactc |
| 19021 | ccattccctg tctattatag gtcgaagtac agcctggggc ctccaggact ggtcacgacc |
| 19081 | ttcctggtcc ctggtattga ctatcagctt ccttggccac ctgctatgag cctgtctcta |
| 19141 | cagtagaagg agattgbggg gagagaaatc ttaagtcata atgaataaag tgcaaacaga |
| 19201 | agtgcatcct gattattttc agaagctgat gaggaata |

[0155] The nucleotide sequence of the human STRC pseudogene is shown in SEQ ID NO: 38.

| Human Stereocilin Pseudogene 1 (STRCP1) | |
|---|---|
| (SEQ ID NO: 38) | |
| 1 | gccctgccct cacctggcta tcccacacag gtgagaataa ccagaactca cctccggtac |
| 61 | cagtgttcac ttggaaacat ggctctcagc ctctggcccc tgctgctgct gctgctgctg |
| 121 | ctgctgctgc tgtcctttgc aggtaagaag aacagtgagc agaactgggg atgaggagga |
| 181 | gggtggctgg aaaaagactt taagaatatg gaggtgaacc tgttagatag aaggacaaag |
| 241 | gagagaggca gagacttgtg caaaagggaa aaatgagggt taagaaaagc aggccaagac |
| 301 | ttactgtagg ccagtgaaag gggttcagct caccatcccc tcacctcatc tttagatcca |
| 361 | ggtagggaac tgtgctcagg ggcagggttg agtttgggct ctgtgttcct ctccttcagt |
| 421 | gacctctggt ttctctcctt acagtgactc tggcccctac tgggcctcat tccctggacc |
| 481 | ctggtctctc cttcctgaag tcattgctct ccactctgga ccaggctccc cagggctccc |
| 541 | tgagccgctc acggttcttt acattcctgg ccaacatttc ttcttccttt gagcctggga |
| 601 | gaatggggga aggaccagta ggagagcccc cacctctcca gccgcctgct ctgcggctcc |
| 661 | atgattttct agtgacactg agaggtagcc ccgactggga gccaatgcta gggctgctag |
| 721 | gggatatgct ggcactgctg ggacaggagc agactccccg agatttcctg gtgcaccagg |
| 781 | caggggtgct gggtggactt gtggaggtgc tgctgggagc cttagttcct gggggccccc |
| 841 | ctaccccaac tcagccccca tgcacccgtg atgggccgtc tgactgtgtc ctggctgctg |
| 901 | actggttgcc ttctctgctg ctgttgttag agggcacacg ctggcaagct ctggtgcagg |
| 961 | tgcagcccag tgtggacccc accaatgcca caggcctcga tgggagggag gcagctcctc |
| 1021 | actttttgca gggtctgttg ggtttgctta ccccaacagg ggagctaggc tccaaggagg |
| 1081 | ctctttgggg cggtctgcta cgcacagtgg gggcccccct ctatgctgcc tttcaggagg |
| 1141 | ggctgctccg tgtcactcac tccctgcagg atgaggtctt ctccattttg gggcagccag |
| 1201 | agcctgatac caatgggcag tgccagggag gtgagtgtgg ccagggctgg gactgggatg |
| 1261 | tggcagggca aggaaagtga aattggggta gttttcttcc ttactctttc cctcctaggt |
| 1321 | aaccttcaac agctgctctt atggtaagta acaggagacc agttctgagg gattgggcct |
| 1381 | ggaaaatctg gaggtgaaga gctgaagacc tcagcctcta gagaggaaaa ctgatgggag |
| 1441 | gagtgtagtt tagtggtttt ggggtgtgac tgtctgggtt ggtgtcccag ctccacctct |
| 1501 | tcctagccat atgaccttga gcaggttaca tagtctttct atacctcagt ttccccattt |
| 1561 | ataaaatgag aatgataata ttagttacca cagagttgtt gcacccggtt aaatgagttg |
| 1621 | atactgtgta tgcaaacgac ttaaaaccgt gctggcacat agcgcttaat aatgttagct |
| 1681 | agtaaagatg ggatttggaa aataaggaca cagctggatt cctctacccc cttactactt |
| 1741 | cagtacaaca atgccagaca gtagttagac atattgagtt gctgagcaga tttcctaaca |
| 1801 | tgaggcccgc tgagggttgt gtttaagcta tctaaaagca tatgaagaaa ggagacagaa |
| 1861 | gggggccagg tggacagaaa gaattccaac tggggcttct cctaggtgat tttggacctt |
| 1921 | ggcagggcag ctttctcttt tttgccccgt tgcagcattt caaccagtaa cgcctaaact |
| 1981 | ctcagggacc tcgcttgtag aaaagcctat gcttgccatg ccccttgagg gctctgagtc |
| 2041 | agggtcagaa tcttcagctg gaggaaatgt gaactgacca gatcctgcct gctcctccct |
| 2101 | ctgcacccag gggcgtccgg cacaaccttt cctgggatgt ccaggcgctg ggctttctgt |
| 2161 | ctggatcacc acccccaccc cctgccctcc ttcactgcct gagcacgggc gtgcctctgc |
| 2221 | ccagagcttc tcagccgtca gcccacatca gcccacgcca acggcgagcc atcactgtgg |
| 2281 | aggccctctg tgagaaccac ttaggcccag caccacccta cagcatttcc aacttctcca |
| 2341 | tccacttgct ctgccagcac accaagcctg ccactccaca gccccatccc agcaccactg |
| 2401 | ccatctgcca gacagctgtg tggtatgcag tgtcctgggc accaggtgcc caaggctggc |
| 2461 | tacaggcctg ccacgaccag tttcctgatg agtttttgga tgcgatctgc agtaacctct |
| 2521 | ccttttcagc cctgtctggc tccaaccgcc gcctggtgaa gcggctctgt gctggcctgc |
| 2581 | tcccaccccc taccagctgc cctgaaggcc tgccccctgt tcccctcacc ccagacatct |
| 2641 | tttggggctg cttcttggag aatgagactc tgtgggctga gcgactgtgt ggggaggcaa |
| 2701 | gtctacaggc tgtgcccccc agcaaccagg cttgggtcca gcatgtgtgc cagggcccca |
| 2761 | ccccagatgt cactgcctcc ccaccatgcc acattggacc ctgtggggaa cgctgcccgg |
| 2821 | atgggggcag cttcctggtg atggtctgtg ccaatgacac catgtatgag gtcctggtgc |
| 2881 | ccttctggcc ttggctagca ggccaatgca ggataagtcg tgggggcaat gacacttgct |
| 2941 | tcctagaagg gctgctgggc ccccttctgc cctctctgcc accactggga ccatccccac |
| 3001 | tctgtctgac ccctggcccc ttcctccttg gcatgctatc ccagttgcca cgctgtcagt |
| 3061 | cctctgtccc agctcttgct caccccacac gcctacacta tctcctccgc ctgctgacct |
| 3121 | tcctcttggg tccaggggct gggggcgctg aggcccaggg gatgcbgggt cgggccctac |
| 3181 | tgctctccag tctcccagac aactgctcct tctgggatgc ctttcgccca gagggccggc |
| 3241 | gcagtgtgct acggacgatt ggggaatacc tggaacaaga tgaggagcag ccaaccccat |
| 3301 | caggctttga acccactgtc aaccccagct ctggtataag caagatggag ctgctggcct |
| 3361 | gctttagtgt gagtgctctg ccagagggaa agctcctaga acagtgagaa ggccctccag |
| 3421 | gggaattcct cgaatactca gaggcagtag tgtggggtag tagttgaagc acacagctct |
| 3481 | agagtcagac aggcttggat tcatatcttg gttctgtgac cagccttgaa tgagttattt |
| 3541 | aacttctctg agcaatattt ttctcgtctc atttataaac tagggatgat aatggtatat |
| 3601 | gagataatac atgcbgtggg cttagcacag tgcatgatac acaaacatgc aataaatatt |
| 3661 | accttgttat tcttttgggc tctttgactc tctcactttc tgcaccagaa agaaaaagga |
| 3721 | tcaagttaga ggactctaaa tttttcccct agagagtgag aattggaggc tggcagaata |
| 3781 | caggaagata aggtaggaat gagaaagatt cagggacact accaatcaga agactttggt |
| 3841 | tctaggttca actgtgccac aaattagtgt gatcttaggc aagcaatttc atttagtttt |
| 3901 | tctgggcttc agtttttagt ctgtagaatg gaggggtgag aatatgttaa acaccataat |
| 3961 | taattcactg agtgcctatt atatgcaagg cactttgcta ggttctgtag gatatataaa |
| 4021 | gatttcttac tccatgttgg ggccaccttt ttcaaaccct gggcccagta aaatggaatt |
| 4081 | agatagtctc atagtatttg gttcaggtct acaagtatta attgagccaa ctatggacct |
| 4141 | ggcatgggag agggtacaag agaaattaga gatatgatcc cggacctaaa agagcttaat |
| 4201 | atctgaagaa tcacacttga gatgatggac aagcatccca gcaagtggag ttggaatgcc |
| 4261 | tgggggagct gcaggagaga cagagaagac agctctgttg gcatattgtc tttcttccca |
| 4321 | ccagcctgtg ctgtgggatc tgctccagag ggaaaagagt gtttgggccc tgcagattct |
| 4381 | agtgcaggta acaggtggag ggcacatggg tgggcbgggt gacagccatg gctggaggtc |
| 4441 | cctgccccgt gaggtgaggc catacccacc atgacctcct attcgcaggc gtacctgcat |
| 4501 | atgcccccag aaaacctcca gcagcbggtg ctttcagcag agagggaggc tgcacagggc |
| 4561 | ttcctgacac tcatgctgca ggggaagctg caggggaagc tgcaggtgag cactgagaaa |
| 4621 | ggggagcaag ggcacctgga gcctagtgtt cagagggctt gctttagtgg gaggaggaac |
| 4681 | tccagagagg aaatggcagg gatactgagc atctccagag gcagaatcca ttcctgtgcc |
| 4741 | cctacaggta ccaccatccg aggagcaggc cctgggtcgc ctgacagccc tgctgctcca |
| 4801 | gcggtaccca cgcctcacct cccagctctt cattgacctg tcaccactca tccctttctt |
| 4861 | ggctgtctct gacctgatgc gcttcccacc atccctgtta gccaacgaca gtgtgtaagg |
| 4921 | ttcttgcact actcctcctg ctcctgtcac ggtcaggcca accgcatcca cctggagcag |
| 4981 | ccccttccgg agctcctctc tgtttttttc tttcatgcca gataggcaat gtgccaacat |
| 5041 | cgtagcaagg tttgagagag gcacatctca cgcctgagtg tgaaaaccca atcattatgc |
| 5101 | taatgaacta caaaaggatc agagagctcc tctctattaa aaccagggag aggatgggcg |
| 5161 | tggtggctca tgcctgtaat cccagcacgt tgggagcccg aggcaggtgg atcactaggt |
| 5221 | ccgcctagtg agttcgagac cagcctggcc aatatggtga aaccctgtct ctattaaact |
| 5281 | acaaaaatta gccaggcatg gtggtgggcg cttgtagtcc cagttactct ggaggctgag |
| 5341 | gcaggaggat agcttgaacc tgggaggcag aggttgcagt gagccaagat cgtgccactg |
| 5401 | cactccagcc tgggtgacag agcgagactc cgtcttaaaa aaaacaaaaa acaaaacaaa |
| 5461 | acaaaaaaac agggagagtc tccttcctat ctagacagca gggctacaga gggtcagagg |
| 5521 | aaaacagttt ggaggaagac aaagggttaa gacccatgac tcctcgcagc ctggctgcca |
| 5581 | tccgggatta cagcccagga atgaggcctg aacagaagga ggctctggca aagcgactgc |
| 5641 | tggcccctga actgtttggg gaagtgcctg cctggcccca ggagctgctg tgggcagtgc |
| 5701 | tgcccctgct cccccacctc cctctggaga actttttgca gctcagccct caccaggtat |
| 5761 | gagaatcatc ttctttactt gactggccca tcttctgcta gtggggacaa agagtcaatg |
| 5821 | gcatgtctct cagtggcccc tccctgcaag aaccctatag tgaccccagt gcgagctaac |
| 5881 | cttccccatc tcagatccag gccctggagg atagctggcc agcagcaggt ctggggccag |
| 5941 | ggcatgcccg ccatgtgctg cgcagcctgg taaaccagag tgtccaggat ggtgaggagc |
| 6001 | aggtacgcag gtgagttgtt gtgggatcag taaccaaggc aagagtggaa gaggtagaga |
| 6061 | gaggaaggca cagcbgtcac gcbgggtcgg tgttctagga agaaaggggc aagagagtag |
| 6121 | gcagtggcct caggcagcat agagttccag gagagaggtc tatagatggt gcccctgtgt |
| 6181 | agtggtgtag tgtcagagtg cccagtgtat gtacccatac catctgctgc caggcctgcc |
| 6241 | ttagtgctag tcttggggac cacacaaagg tcagcttcat gccctcctca ggcttgggcc |
| 6301 | cctcgcctgt ttcctgagcc ctgaggagct gcagagccta gtgcccctga gtgatccaac |
| 6361 | ggggccagta gaacgggggc tgctggaatg tgcagccaat gggaccctca gcccagaagg |
| 6421 | acgggtgagc ccctcagcac aagcctacaa gactttaggc ttcccctggg tctgtgtgga |
| 6481 | tggctttccc attgtgtcaa cttgagcaca gtggtgccag cccccatccc acttttgcaa |
| 6541 | cctccattcc ttactccatg gccattctta cctgttacca cctcttcctg gcccttctct |
| 6601 | atctggtctg tagcacccca aacataccct ttgccatttt gaacctaatc tactccagtc |
| 6661 | caatccctag ttccaaaccc tagcccaggc cctgggaaat tcagatgtgg gattagagag |
| 6721 | gaagttcaag gttcatctgt cttttctctc cagtcctaaa ccttctttgg ttacaggtgg |
| 6781 | catatgaact tctgggtgtg ttgcgctcat ctggaggagc ggtgctgagc ccccgggagc |
| 6841 | tgcgggtctg ggcccctctc ttctctcagc tgggcctccg cttccttcag gagctgtcag |
| 6901 | agccccagct tagagccatg cttcctgtcc tgcagggaac tagtgttaca cctgctcagg |
| 6961 | tttgcctgtc tcactccctg gcatgtaccc tccatccccg cttgagcccc agtcaagaga |
| 7021 | atcccattca gggataaaag cagcccctcc tttccctggg tgaacagtag aggtaaactc |
| 7081 | tgtctgcagg aggacgcctt cattcccttt cctcagatca agaagggacc tgagtcactg |
| 7141 | aggatggtta ctggggatgg ttaagaggca gcgggaagtt ttggagggtt tgccttagga |
| 7201 | acccacttag gacctggctg ctgggtcctg agagcbgttg ttttcggtcc catcccaaca |
| 7261 | caggcbgtcc tgctgcttgg acggctcctt cctaggcacg atgtgagtag cagcaacttc |
| 7321 | tcagcctccc gccagaggtc tctatcctct tttaacctgg ctcctgcatc tgcccctcct |
| 7381 | ctctctccgc tcccctcata cttactgcct tgctgcattg tgattgttgt cttccccaac |
| 7441 | acccttccct tcttcttcag gcctcttgtc tctcttgctc tttagctatc cctggaggaa |
| 7501 | ctctgctcct tgcaccttct gctaccaggc ctcagccccc agacactcca ggccatccct |
| 7561 | aggcgagtcc tggtcggggc ttgttcctgc ctggcccctg aactgtcacg cctctcagcc |
| 7621 | tgccagaccg cagcactgct gcagaccttt cgggtatgag agtggcaagg aggatgagat |
| 7681 | aatcagggat accggctctt tctggttggg aggaaggcat cttccctgag gccagggaag |
| 7741 | gcctttcata cctccccact tacacacaca cacacacaca cacacacaca accaattctc |
| 7801 | atgcaggtta aagatggtgt taaaaatatg ggtacaacag gtgcbggtcc agctgtgtgc |
| 7861 | atccctggtc aggtaagtgt gagatctccc aactgagctc ctctccccat tctggggcag |
| 7921 | tttcatatgg ctggtgctac ctcccacact accctgcagt ggccctgaga gttctggtta |
| 7981 | gctctgtgcc cattagcagc cctccccagt gccagatgca ggacagcatg atccactcac |
| 8041 | attgtcctag actaatgtca aagctggaag ggcctgagaa atcttccagg ccacccaccc |
| 8101 | tgctttcaga tgaaaagacc aaggcbggga gaagctaagg gactttgttt gcctggtgcc |
| 8161 | taactagcag caacacttga ccacagcagc ctgcagtgtg aggctcttag gcgtttattg |
| 8221 | ctacagtggc aaatgccatt ccacttctgt cctagctttg gtccctttcc acccccatgg |
| 8281 | ttccttttct ctgagtgcta agtacagact ctctcaccta tcactacact gctataccca |
| 8341 | tcaccgccag cagcctattc ccaccacctg gccagactgc ctgcttcccc tgctcccatt |
| 8401 | aaagctgcta caactggatt ccttggctct tctggcaaat cgaagacgct actgggagct |
| 8461 | gccctggtct gagcagcagg taattctccc cacttaattt cagaacttcc tccctcaatg |
| 8521 | tagtctacct tctttaccta tcccttagcc ctatttggcc agcttatccc tactatcctt |
| 8581 | tatttgattg tttgagatac agtctcactc tgttgcccag gctgcagtgc agtggcatga |
| 8641 | tcagagttcg ctgtaacctc aaactcatga gctcaggcaa tctttctgcc tcagcctcct |
| 8701 | gaatagctag gatgacaggt ggttaccacc atgcctggct aatttttaaa tttttttttt |
| 8761 | gttttttgag atgaagtctt gctctgtcac ccaggcttga gtacagtggc acaagcttgg |
| 8821 | ctcactgcaa cctctgtctc ccgggttcaa gcgattctcc tgcctcagcc tcccgagtag |
| 8881 | ctgggactac aggcactccc cacaatgccc ggctaatttt ttttttgttt tagtagagac |
| 8941 | agggtttcac catattggcc aggctggtct cgaactgctg accttgtgat ctgcctgcct |
| 9001 | ctgcctctca aagtgctggg attacaggtg tgagccacca tgcccggcca atttttaaat |
| 9061 | tttttgtaga gacagacaat acaaaaatgt ggacactatg tggagacact atgttgaggt |
| 9121 | actatgctgt ccagattggt cttgaactcc tggcctcaag caatcctcct gccttggcct |
| 9181 | cccaaagtgc tgggattaca gacctgagcc actgcaccca gccccctagt atcccttata |
| 9241 | atgtgacttg cttttctttt tctttctcct tcccttttct ttcatttctt tctcactctc |
| 9301 | gagagaagag tgggcatctg ggagagtggg aggctggtgg gtcccacaga gtgaggaggc |
| 9361 | aggactgggt ccaaggcagt cctgcctctc cactctaggg ggtatccttg gacagtgtct |
| 9421 | cttctgggaa ggggctcgtc tttctttctc ttgtaggcac agtttctctg gaagaagatg |
| 9481 | caagtaccca ccaacctgac cctcaggaat ctacagtgag taacttgtgt tgagcagtgc |
| 9541 | gctgaattcg accaacattt ttttgagtgc ttactatgtg ccaggcacca tatgatatgg |
| 9601 | aatgggggat atagggatga atgatgcata gtccctgcct cgtggacgtt ctcctagcac |
| 9661 | ctccctttgc cctcctttcc ttccacagtg ccatgcctat cctgactaga gccaaaggac |
| 9721 | tcagaaaacc tggattcagg ttccagtcct gtcacctact tgtcctcttg ggcaagtcat |
| 9781 | ttaacgtccc tgtgtcagtt ttcccttctt taaatgagaa ttacaatggc accagcctca |
| 9841 | taggtagtta ctgtgaagat taaatgaggt aggtcatgta agatatttaa cacagtgttt |
| 9901 | ggtccattgt aaagttccag tagtcatttg ctactgttag tttacttcag gatgacttca |
| 9961 | gaggcactgg ccaagcaaga ataaatagga ataagaaggt atcactttac ttatacccac |
| 10021 | attagaagaa caatgggctt cagaatcttt tttttttttt ttttcgagac agtcttgctc |
| 10081 | tgttgcccag gctggagtgc agtggcgcga tttcggctca ctgcaacctc tgcctcccag |
| 10141 | gttcaagcga ttctcctgtc tcagcctctg gagtagctgg gattacagga atgtgccacc |
| 10201 | atacccagct aatttttgta tttttagtag agatggggtt tcaccatttt ggccaggctg |
| 10261 | gtctcaaact cctgacctca ggtgatccac ccgcctcagc ctcccaaggg cttcagaatc |
| 10321 | taagacatgt ctctagtttc agtttaccac atttctagca gaatgatgtt gggaatgtca |
| 10381 | cctgacttcc ataaatcctt attttctcct ctgataaaca gcagtgatgt tatggggagc |
| 10441 | tgatgagata tctatgtaaa aacatttctc aaaccataaa ttacggtgga tgaacatctg |
| 10501 | tacttgtgtt gagagtactg atatcaagga gcaaacaggc tgttgtatgt gttgaatgag |
| 10561 | cctctcccca ctcacacacc cacagggctc tgggcaccct ggcaggaggc atgtcctgtg |
| 10621 | agtttctgca gcagatcaac tccatggtag acttccttga agtggtgcac atgatctatc |
| 10681 | agctgcccac tagagttcga gggagcctgg tgagagggga tgcctggact ttagtgggag |
| 10741 | cagggaggct gggaccctag gtatagaacc cagctcctat gttctgctct ggcctcactc |
| 10801 | tgcttcccta cagagggcct gtatctgggc agagctacag cggaggatgg caatgccaga |
| 10861 | accagaatgg acaactgtag ggccagaact gaacgggctg gatagcaagc tactcctgga |
| 10921 | cttaccgtaa gtactgcagc tagagatatt ggcccctcag aaagctcaat ctggggtgaa |
| 10981 | gatctgccct tagggaatgc cctggaggag gtagtttttc tgtctggtag ttccctgaca |
| 11041 | taatttatag cccaaagcag aggattttat tcaaagttgc tctatgtatt gactggttcc |
| 11101 | cagaatatgc tccagcacag ggcagctgag ggtggcaaca ctgtattgaa gcctgccaag |
| 11161 | taatcttaca ataacctagt ccacattaat tgagattgag acagagcatc tgaagtgagg |
| 11221 | gaggcaatgc tccaaatctg ccccagagga ttgtagtttg ctcagggcac tgtgttctta |
| 11281 | gtgcattcag aggagtggat cgagagaaaa atatatgaaa aatgtgataa ataccttcaa |
| 11341 | atacctgagg ggctatcaag tagaaattag attgtcatat ttatgagtgg ccccattggg |
| 11401 | caagactaag agtagttaac ggagatcaga tttttacata gtataagaaa aactaaggta |
| 11461 | gtgagttcct ggtccttgga gcbgttcgag cctaagccag atggccccat ggcaggaatg |
| 11521 | ttgtagagca cgttcatata caggttgtgg gaagaaaagg ctataggaac ccaaggctcc |
| 11581 | tccctaccca tggagaaatt tattagtatg ttactcatat gctgcttttc tcattttacc |
| 11641 | cctaccacca ccccgttgcc atccgcactg taagtcagga taggaaaatg ctggtgttac |
| 11701 | agtcttcctg gggaatatgg agctgaagtg gagtaaaagc agttgacttc attcttactt |
| 11761 | ttttcttttt cttttttttt ttttttttga gacagagttt tgcbgtgtca ccaaggctgg |
| 11821 | agtgcagtga cgtgatctcg gctcactgca acctccatct tccaggttca agcaattctc |
| 11881 | ctgcctcagt ctcccgagta gcbgggactg taggtgtgca ccaccatgcc aggctaattt |
| 11941 | ttgtatttgt tgtagggacg agctttcacc atgttggcca ggcbggtctt gaactcctgg |
| 12001 | cttcaagtga tctgcccacc tcggcttccc aacattctta tatttttata ggcctttcca |
| 12061 | cagatttcag ctcttgtatg acttagccca gttccagaac tggtaatcct aggtagggta |
| 12121 | caggttatca cctctgattt cgggtaaaag ggatttattt atttatttgt ttatttattt |
| 12181 | atatttttga gacagagtct cgctctgtca cccaggctgg agtgcaatgg tgccatctcg |
| 12241 | gctcactgca acctctccct ctggggttca agcacttctg cctcagcctc ctgagtagct |
| 12301 | gggattacag gcgcgtgcca ccacacccgg ctaatttttg catttttagt agagacgggg |
| 12361 | tttcaccatg ttgctcaggg tggtctcgaa tttctgaccc tgtgatctgc ctgcctcggc |
| 12421 | ctcccaaagt gcbgggatta caggcatgag ccactgcgtc cggcctgttt ttactttttt |
| 12481 | ttaatgccat tcagatctgt ttaaatatgt gggttctgtg agataattta gaatcccaag |
| 12541 | gttacagatg aggtgaaaga tcctagacca tgcatcaaaa aacttgagtt tctcatttgt |
| 12601 | gaaagaagga taagagaaac acctattttg tctgggtgca gtggctcatg cctataatcc |
| 12661 | cagcatttgg ggaggccaag gtgggtggat cacggaggtc aggtgttcaa gaccagactg |
| 12721 | gccaacatgg caaaacacca tctctactaa aaatacaaaa gttagcbggg cgtggtggca |
| 12781 | cgtgcgtgta attccagcta ttcgggaggc tgaggcacga gaattgcttg aacctgggag |
| 12841 | gtgcgggttg cagtgaactg agatcgcagc accactgtgc tccagcctga gtgatggagt |
| 12901 | gaggccaggt cttgttgtag gatcaaatga gataacacct gaaagaactt tgtaaattgt |
| 12961 | atagcacgta caaacaagaa gggacctctt cacaagcaga ggaagggtgg tcctgtggaa |
| 13021 | aaaaacggga attgggagtg agagacctca acatttgatc tctgtgaacc tcagtttttt |
| 13081 | aatctataaa atggggaaat gttaatggta cttaatattt ggagcttttg agtccattag |
| 13141 | atcaggtagg attgttcgtt attttttttt tttaggaaga ctagaaatat gttgctccct |
| 13201 | ttttctcccc cactcaagct tgatggtggg aattggccct ggagcbgttt actgtcagtt |
| 13261 | cctgtccagc ttcactaaat ttggtctggg gtcacatctt agcbggggac tgtggggttc |
| 13321 | tgtggtccct tctcgacttg gcccagctcc acttgaatga tattgttgtc aaattgctat |
| 13381 | aatagaatcc agttgatgga cagactatcc aatgaatcca ttatgttggt ggtggagctg |
| 13441 | gtgcaaagag ctccagagca gctgctggca ctgacccccc tccaccaggc agccctggca |
| 13501 | gagagggcac tacaaaacct ggtaagagtc caccctacca gactcagatt tgctgccctg |
| 13561 | ggcaattctt gctcctcaga caatgctctc tgactgtcct ccaaccctct acttcttgct |
| 13621 | ttcttgctgc caaacaggtt cctgtctaca aggcctggcc cgttttgcct ctgggttctg |
| 13681 | ttccttgata atatgcttca cgttacttgt ccatacctct tggagtccga gaaatctctt |
| 13741 | ggagtccacc tctcagtctt tctgcctgct cctatctggt ctcattgctt aagaaagtga |
| 13801 | acaaaggtag tgagcatcat agggtgctga gttgggagca ggagggaggg aaggtcaggg |
| 13861 | ggcttggtgt cttgatcaag gtgtctggta ttctgagtca gaagtgcatt gtccaagttc |
| 13921 | tgatgctctt ctccaggctc caaaggagac tccagtctca ggggaagtgc tggagacctt |
| 13981 | aggccctttg gttggattcc tggggacaga gagcacacga cagatccccc tacagatcct |
| 14041 | gcbgtcccat ctcagtcagc tgtaaggctt ctgcctagga gagacatttg ccacagagct |
| 14101 | gggatggctg ctattgcagg agtctgttct tgggtatgga tcttcgagaa cttcagattc |
| 14161 | taactcattc tatacccagt ccctcagcca ccatcatcag tggcagcctg ttccatattc |
| 14221 | ctaagggccc ttggagccct gtgtccgaaa tcctagcatg tcctcttttc cccttccttt |
| 14281 | tcctcacagt tccctcagct ccccagcccc cgattttctt cctgtcccca ggaaaccaga |
| 14341 | gttgtggagc caggatgaag tagagcaagc tggacgccta gtattcactc tgtctactga |
| 14401 | ggcaatttcc ttgatcccca gggtgagatg aaggaagaag ggaagggagt aaatgcatag |
| 14461 | aggggactgg tgagctggtt atggggaccc gtggccaacg agggcaaagg atatgaagcc |
| 14521 | tagatctggg gggatactgc gaaacagaga caggactttg gacttatagc tatagcagca |
| 14581 | ggtcctgatc tgtccagatc tccccactct ccttctacct tctcatgcag gaggccttgg |
| 14641 | gtccagagac cctggagcgg cttctagaaa agcagcagag ctgggagcag agcagagttg |
| 14701 | gacagctgtg tagggggcca cagcttgctg ccaagaaagc agccctggta gcaggggtgg |
| 14761 | tgcgaccagc tgctgaggat cttccaggtg aaactaccca aatacttata tgtccagcag |
| 14821 | gatgtacagg gagtatcaaa cggtctgggt tctacatgtg cttttctctg ggactgggtt |
| 14881 | ttctaattta taaagcaaag agtttagagg gatgatcttc aagtctcgtc tagttctaaa |
| 14941 | attctatagc tctgggagtg tgtaaactat taagttttcc tttagcccag aacttccatt |
| 15001 | ttcctgctgt cttgtctctt taaacagctg actcagctct agctcggcta agtgtggagc |
| 15061 | tctctgctgg ggagatccct cgaaggagac attgtgaggc tagagaactg gtttcaaatt |
| 15121 | cagctctgcc atgaaatccc tgaccaacat cctcagtctt ccatctataa aatgagggac |
| 15181 | ttggcatctc caatcacttc ttgttcaatt cacttctaag ccctatacat cttaacctgt |
| 15241 | aatactccct cgatccctac ttcccacagt gctccatcct ccaaaggttg gaagagtcat |
| 15301 | tccatctaca gatacctcct ggccctgcct tcccccttca gaacctgtgc caaattgtgc |
| 15361 | agatgtacga gggacattcc cagcagcctg ctctgcaacc cagattgctg agatggagct |
| 15421 | ctcagacttt aaggactgcc tgacactatt tgcaggagac ccaggacttg ggcctgagga |
| 15481 | accacgggca gccatgggca aagcaaaatg ggtcagggac ggagagccaa ctgaggttgg |
| 15541 | ccatgaggaa gctgtgtggg tgtgatgtag gacacgaaga gaatagagag ttggatgaga |
| 15601 | ggtgggggaa gcagaagata aaagagttag aagatttggg tcacaagtag aaggtgagga |
| 15661 | gagataaata ttgaggaaag agagctacta taatgaatag agggactaaa gcagtgatta |
| 15721 | ccaaatttta atgcatatca caatcatcaa gggaacagat ttttttcttt tttctttttt |
| 15781 | tttctttctt aaaaaataat ggcatacttc atgaatttgt gtgttatcct tgcgcaggcg |
| 15841 | ccatgctaat ctctgtatca ttccaatttt tttttgtata tgtgctgctg aaccgagcac |
| 15901 | gggaacagtg ccaatgctgg attaccatgc tagactgact taataaaaac ctttgcggag |
| 15961 | gctggacgga gtggctcgtg cctgtaatca cagcactttg ggaggctgag gcaggtggat |
| 16021 | tgcttgagcc caggagtttg agaccagact gggcaacatg gtgaagccct gtctctacta |
| 16081 | aaaatagaaa aaaaattagc tgggtgtggc ggcacatgcc tgtaatccca gctactcagg |
| 16141 | aggcbggggt aggagaatcc cctgagcgca ggaggtggag ggtgcaatga gccaagatca |
| 16201 | caccactgca ctccagcctg ggtgtcagag caagaccctg tctcataaat taaaaaataa |
| 16261 | gcctctggga gaaagtctag acatctgcat ctgctttttt tttttttttt ttttttgaga |
| 16321 | cacagtctca ctctgtcacc cagcatccag gctggagtgc ggtggtgtga tcttggctca |
| 16381 | ctgtaacctc tacatcctgg gctcaaacga tcctcctgcc tcagcctctc gagaagctgg |
| 16441 | gactacaggt gcacaccact acacctggct aatttttgta tttttggtag agatgaggtt |
| 16501 | tcgcbgtgtt gcccaggatg gtcttgaact cctgggctca agcattcctc ccacctcagc |
| 16561 | ctcccaaagt gcbgggatta cagctgtgag ccactgtgct gggccccagg catctgcatt |
| 16621 | ttaataagcg tctctgtgtc tgatgcacat aaaagtgtgg aactcatgga ctagagttag |
| 16681 | tttgctcttc ttttccactg attgtaatgt ctttcaaaac accttagagg aactgtaagg |
| 16741 | caacggtctc attttatagt ggaggaaacc aaagaaaagg caagtgactt gcctagagtt |
| 16801 | atacagctaa ggtcagaggc aagacttaaa acccagcatt ctgactccca atctactggt |
| 16861 | tttccactca cattgttcct ctctttctcc tagttgtggg gtcccccccg gggatttggt |
| 16921 | cctgagcaga tcctgcagct cggtagactc ttaataggtc tgggagatca ggaactacag |
| 16981 | gagctgatcc tagtggactg gggagtgctg agcaccctgg ggcagataga tggctggagc |
| 17041 | tccactcagg taacactttt actcctccct accgcttccc aaacacccat cccacagacc |
| 17101 | cagccctata gatcatctaa agcccaagga attttttcct gtgaccctac ctggtcattc |
| 17161 | tttctgtctt ttgttaatat cccatactag tgaccttcag gactcttgat ttattcactc |
| 17221 | tgaggccctg gacacataat actgtctcct acctcttttc ctggaggctt cctctttttc |
| 17281 | tttccttttc ttttctgagt cctcagcctt ccccatgact ccttaggtct taatagtaac |
| 17341 | agaatataac ccagtaacac ctatcacttc cctgtccatt aattctccat aactttcctc |
| 17401 | cttcccctct tctcccaccc cccaccccag ctccgcattg tggtctccag tttcctacgg |
| 17461 | cagagtggtc ggcatgtgag ccacctggac ttcgttcatc tgacagcgct gggttatact |
| 17521 | ctctgtggac tgcggccaga ggagctccag cacatcagca gttgggagtt taggtcattt |
| 17581 | gtgaaggggc tgagggtggt cgtgttcagg taaaggtgga cttgcbgggg aaaggaggat |
| 17641 | catgaagtta tagtcccatg gaggaaggga actcatttga agccatctct tcctttgtct |
| 17701 | catgaccaca gtccctttca ctgaagccga attcttcttc cttccttccc actgttctac |
| 17761 | agccaagcag ctctcttcct gggcaccctg catctgcagt gctctgagga acaactggag |
| 17821 | tttctggccc acctctttgt actgcctggt gggtttggcc caatcagtaa ctgggggcct |
| 17881 | gagatcttca ctgaaattgg caccatagca ggtggggagc tgggccactg ctggtgcaag |
| 17941 | ttggtttggt ttctatacca tgggtggact ggatggaaga ctgccctgca attcttcagg |
| 18001 | tgtgggcctg agagggtgtt taaataaggg gctagagaca tattggggaa ggtctatgat |
| 18061 | agggcacttt gggagtagtt agagaaggtc tataggtttg aagagaggga aggtcagtct |
| 18121 | aagacaatgt ttggatgcca cttgcttcaa cagcbgggat cccagacctg gctctttcag |
| 18181 | cactgctgcg gggacagatc cagggcgtta ctcctcttgc catttctgtc atccctcctc |
| 18241 | ctaaatttgc tgtaagtatt aatggactgg ggtgaccaca ggagagccag ggcccaatgg |
| 18301 | ggactacatg catgcactga ttcctacccc tgccctcagg tggtgtttag tcccatccaa |
| 18361 | ctatctagtc tcgccagtgc tcaggctgtg gcbgtcactc ctgagcaaat ggcctttctg |
| 18421 | agtcctgagc agcgacgagc agttgcatgg gcccaacatg agggaaagga gagcccagaa |
| 18481 | cagcaaggtg agttcccagc tgcacagctt gatcctccat ctcctgaccc agaatcaaac |
| 18541 | ccctaatttg gtgcbgtctg gctcttagag tgcacccagg gagatccctg gagtgaagga |
| 18601 | gtctacaggc agagcgctaa tttccaagta tcaatgctcc tggagagctg agttgtgata |
| 18661 | ttactcccat tccctgtcta ttataggtcg aagtacagcc tggggcctcc aggactggtc |
| 18721 | acgaccttcc tggtccctgg tattgactat cagcttcctt ggccacctgc tatgagcctg |
| 18781 | tctctacagt agaaggagat tgtggggaga gaaatcttaa gtcataatga ataaagtgca |
| 18841 | aacagaagtg catcctgatt attttcagaa gctgatgagg aata |

### Clarin 1 (CLRN1)

[0156] The CLRN1 gene encodes “clarin 1” (CLRN1), a protein that is expressed in hair cells of the inner ear (e.g., inner ear hair cells, outer ear hair cells) and in the retina.

[0157] The human CLRN1 gene is located on chromosome 3q25.1. It contains 7 exons encompassing ˜47 kilobases (kb) (Vastinsalo et al. (2011) Eur J Hum Genet 19(1): 30-35; NCBI Accession No. NG_009168.1).

[0158] Various mutations in the CLRN1 genes have been associated with Usher syndrome type III (e.g., Usher syndrome type MA (MIM #606397) (see, e.g., Fields et al. (2002) Am J Hum Genet 71: 607-617, and Joensuu et al. (2001) Am J Hum Genet 69: 673-684) and retinitis pigmentosa (see, e.g., Khan et al. (2011) Ophthalmology 118: 1444-1448). Usher syndrome type III-causing mutations have been predominantly found in exon 3 of CLRN1. Usher syndrome type III-deafness can be modeled by generating CLRN1-deficient mice (see, e.g., Geng et al. (2017) Sci Rep 7(1): 13480). Exemplary mutations CLRN1-associated with Usher syndrome type III include: T528G, M120K, M44K, N48K, and C40G.

[0159] Exemplary mutations CLRN1-associated with retinitis pigmentosa include L154W and P31L (see, e.g., Khan et al. (2011) Ophthalmology 118: 1444-1448).

[0160] Additional exemplary mutations in a CLRN1 gene that have been detected in subjects having hearing loss and methods of sequencing a nucleic acid encoding CLRN1 are described in, e.g., Fields et al. (2002) Am J Hum Genet 71: 607-617, Joensuu et al. (2001) Am J Hum Genet 69: 673-684, Adato et al. (2002) Europ J Hum Genet 10: 339-350, Aller et al. (2004), Clin Genet 66: 525-529. Methods of detecting mutations in a gene are well-known in the art. Non-limiting examples of such techniques include: real-time polymerase chain reaction (RT-PCR), PCR, sequencing, Southern blotting, and Northern blotting.

[0161] An exemplary human wildtype CLRN1 protein is or includes the sequence of SEQ ID NO: 39, SEQ ID NO: 41, SEQ ID NO: 43 and SEQ ID NO: 45. Non-limiting examples of nucleotide sequences encoding a wildtype CLRN1 protein are or include SEQ ID NO: 40, SEQ ID NO: 42, SEQ ID NO: 44 and SEQ ID NO: 46.

[0162] In some embodiments of any of the compositions described herein, the CLRN1 protein comprises a sequence that is at least 75% (e.g., at least 80%, at least 85%, at least 90%, at least 91%, at least 92%, at least 93%, at least 94%, at least 95%, at least 96%, at least 97%, at least 98%, at least 99%) identical to SEQ ID NO: 39.

[0163] In some embodiments of any of the compositions described herein, the CLRN1 protein comprises a sequence that is at least 75% (e.g., at least 80%, at least 85%, at least 90%, at least 91%, at least 92%, at least 93%, at least 94%, at least 95%, at least 96%, at least 97%, at least 98%, at least 99%) identical to SEQ ID NO: 41.

[0164] In some embodiments of any of the compositions described herein, the CLRN1 protein comprises a sequence that is at least 75% (e.g., at least 80%, at least 85%, at least 90%, at least 91%, at least 92%, at least 93%, at least 94%, at least 95%, at least 96%, at least 97%, at least 98%, at least 99%) identical to SEQ ID NO: 43.

[0165] In some embodiments of any of the compositions described herein, the CLRN1 protein comprises a sequence that is at least 75% (e.g., at least 80%, at least 85%, at least 90%, at least 91%, at least 92%, at least 93%, at least 94%, at least 95%, at least 96%, at least 97%, at least 98%, at least 99%) identical to SEQ ID NO: 45.

| Human Full-length Wildtype CLRN1 Protein Isoform D | |
|---|---|
| (SEQ ID NO: 39) | |
| MPSQQKKIIFCMAGVFSFACALGVVTALGTPLWIKATVLCKTGALLVNASGQELDKFMGEMQYGLFHGEGV | |
| RQCGLGARPFRFSFFPDLLKAIPVSIHVNVILFSAILIVLTMVGTAFFMYNAFGKPFETLHGPLGLYLLSF | |
| ISVALWLPATRHQAQGSCGCLVMILFASEVKIHHLSEKIANYKEGTYVYKTQSEKYTTSFWVIFFCFFVHF | |
| LNGLLIRLAGFQFPFAKSKDAETTNVAADLMY | |
| Human Wildtype CLRN1 Isoform D cDNA | |
| (SEQ ID NO: 40) | |
| atgccaagccaacagaagaaaatcattttttgcatggccggagtgttcagttttgcatgtgccctcggagt | |
| tgtgacagccttggggacaccgttgtggatcaaagccactgtcctctgcaaaacgggagctctgctcgtca | |
| atgcctcagggcaggagctggacaagtttatgggtgaaatgcagtacgggcttttccacggagagggtgtg | |
| aggcagtgtgggttgggagcaaggccctttcggttctcattttttccagatttgctcaaagcaatcccagt | |
| gagcatccacgtcaatgtcattctcttctctgccatccttattgtgttaaccatggtggggacagccttct | |
| tcatgtacaatgcttttggaaaaccttttgaaactctgcatggtcccctagggctgtaccttttgagcttc | |
| atttcagttgccctttggctgccagctaccaggcaccaggctcaaggctcctgtggctgtcttgtcatgat | |
| attgtttgcctctgaagtgaaaatccatcacctctcagaaaaaattgcaaattataaagaagggacttatg | |
| tctacaaaacgcaaagtgaaaaatataccacctcattctgggtcattttcttttgcttttttgttcatttt | |
| ctgaatgggctcctaatacgacttgctggatttcagttcccttttgcaaaatctaaagacgcagaaacaac | |
| taatgtagctgcagatctaatgtactga | |
| Human Full-length Wildtype CLRN1 Protein Isoform A | |
| (SEQ ID NO: 41) | |
| MPSQQKKIIFCMAGVFSFACALGVVTALGTPLWIKATVLCKTGALLVNASGQELDKFMGEMQYGLFHGEGV | |
| RQCGLGARPFRFSFFPDLLKAIPVSIHVNVILFSAILIVLTMVGTAFFMYNAFGKPFETLHGPLGLYLLSF | |
| ISGSCGCLVMILFASEVKIHHLSEKIANYKEGTYVYKTQSEKYTTSFWVIFFCFFVHFLNGLLIRLAGFQF | |
| PFAKSKDAETTNVAADLMY | |
| Human Wildtype CLRN1 Isoform A cDNA | |
| (SEQ ID NO: 42) | |
| atgccaagccaacagaagaaaatcattttttgcatggccggagtgttcagttttgcatgtgccctcggagt | |
| tgtgacagccttggggacaccgttgtggatcaaagccactgtcctctgcaaaacgggagctctgctcgtca | |
| atgcctcagggcaggagctggacaagtttatgggtgaaatgcagtacgggcttttccacggagagggtgtg | |
| aggcagtgtgggttgggagcaaggccctttcggttctcattttttccagatttgctcaaagcaatcccagt | |
| gagcatccacgtcaatgtcattctcttctctgccatccttattgtgttaaccatggtggggacagccttct | |
| tcatgtacaatgcttttggaaaaccttttgaaactctgcatggtcccctagggctgtaccttttgagcttc | |
| atttcaggctcctgtggctgtcttgtcatgatattgtttgcctctgaagtgaaaatccatcacctctcaga | |
| aaaaattgcaaattataaagaagggacttatgtctacaaaacgcaaagtgaaaaatataccacctcattct | |
| gggtcattttcttttgcttttttgttcattttctgaatgggctcctaatacgacttgctggatttcagttc | |
| ccttttgcaaaatctaaagacgcagaaacaactaatgtagctgcagatctaatgtactga | |
| Human Full-length Wildtype CLRN1 Protein Isoform C | |
| (SEQ ID NO: 43) | |
| MQALQQQPVFPDLLKAIPVSIHVNVILFSAILIVLTMVGTAFFMYNAFGKPFETLHGPLGLYLLSFISGSC | |
| GCLVMILFASEVKIHHLSEKIANYKEGTYVYKTQSEKYTTSFWLTKGHS | |
| Human Wildtype CLRN1 Isoform C cDNA | |
| (SEQ ID NO: 44) | |
| atgcaggccctgcagcagcaaccagtttttccagatttgctcaaagcaatcccagtgagcatccacgtcaa | |
| tgtcattctcttctctgccatccttattgtgttaaccatggtggggacagccttcttcatgtacaatgctt | |
| ttggaaaaccttttgaaactctgcatggtcccctagggctgtaccttttgagcttcatttcaggctcctgt | |
| ggctgtcttgtcatgatattgtttgcctctgaagtgaaaatccatcacctctcagaaaaaattgcaaatta | |
| taaagaagggacttatgtctacaaaacgcaaagtgaaaaatataccacctcattctggctgactaaaggcc | |
| acagctga | |
| Human Full-length Wildtype CLRN1 Protein Isoform E | |
| (SEQ ID NO: 45) | |
| MPSQQKKIIFCMAGVFSFACALGVVTALGTPLWIKATVLCKTGALLVNASGQELDKFMGEMQYGLFHGEGV | |
| RQCGLGARPFRFSCYFLDPFMGLPTGVPHLLSLPCSTSCRREHTSERVQEPAGCFSAVRSKLHAGPAAATS | |
| FSRFAQSNPSEHPRQCHSLLCHPYCVNHGGDSLLHVQCFWKTF | |
| Human Wildtype CLRN1 Isoform E cDNA | |
| (SEQ ID NO: 46) | |
| atgccaagccaacagaagaaaatcattttttgcatggccggagtgttcagttttgcatgtgccctcggagt | |
| tgtgacagccttggggacaccgttgtggatcaaagccactgtcctctgcaaaacgggagctctgctcgtca | |
| atgcctcagggcaggagctggacaagtttatgggtgaaatgcagtacgggcttttccacggagagggtgtg | |
| aggcagtgtgggttgggagcaaggccctttcggttctcatgctattttcttgaccccttcatgggactccc | |
| aacaggggtaccccatttactcagcctgccctgctcaacctcttgcaggagggagcacacgagtgaacgag | |
| tgcaggaaccagctggctgctttagtgctgtgaggagtaaactccatgcaggccctgcagcagcaaccagt | |
| ttttccagatttgctcaaagcaatcccagtgagcatccacgtcaatgtcattctcttctctgccatcctta | |
| ttgtgttaaccatggtggggacagccttcttcatgtacaatgcttttggaaaaccttttga | |
| Human Wildtype CLRN1 Genomic sequence (NCBI Accession No. NG_009168.1) | |
| (SEQ ID NO: 47) | |
| 1 | aggagatact tgaaggcagt ttgaaagact tgttttacag attcttagtc caaagatttc |
| 61 | caattaggga gaagaagcag cagaaaagga gaaaagccaa gtatgagtga tgatgaggcc |
| 121 | ttcatctact gacatttaac ctggcgagaa ccgtcgatgg tgaagttgcc ttttcagctg |
| 181 | ggagctgtcc gttcagcttc cgtaataaat gcagtcaaag aggcagtccc ttcccattgc |
| 241 | tcacaaaggt cttgtttttg aacctcgccc tcacagaagc cgtttctcat catgccaagc |
| 301 | caacagaaga aaatcatttt ttgcatggcc ggagtgttca gttttgcatg tgccctcgga |
| 361 | gttgtgacag ccttggggac accgttgtgg atcaaagcca ctgtcctctg caaaacggga |
| 421 | gctctgctcg tcaatgcctc agggcaggag ctggacaagt ttatgggtga aatgcagtac |
| 481 | gggcttttcc acggagaggg tgtgaggcag tgtgggttgg gagcaaggcc ctttcggttc |
| 541 | tcatgtaagt agcaattgca tttgagttat ttaatgcttt aggcagactc ttcccagtgt |
| 601 | tgcgaggaat tatatttgag aattttgccg tgtttactgc aggacttttt aaatcggtgt |
| 661 | gaaccatatg aaaaacctat gactctgagc aatttcttct tcctagtttt tattatttta |
| 721 | tacttgcttt ttattataat atagagttaa ttcattgtta cataattaag gtttttggaa |
| 781 | atattggcaa ttaagatgct taagtattaa tatttatgta aaaaattatg gagtcttttt |
| 841 | aaaaaagtaa acttggggaa ataggaaagc tgtaaagaat gatctttatg ctttttgttc |
| 901 | tttataaaaa gaaccaaggt catgggctcc gtatttaacc aggttgccac ctttctcatg |
| 961 | attttgtttc ctgctcccca ctccctccca ttattcctgc taagaccttt cctgctgcta |
| 1021 | aatattcagt tttcattttt aactaatttg gaatcatttg gctatagaaa tttaaaatga |
| 1081 | tctgcbgtgc taactgggaa agaaatggat gcctatttag tatagaacat tttaaactga |
| 1141 | ttgacctgca aatcatgtag agaatatgag agagattttc ttgttgtgat ttttgtgaaa |
| 1201 | tggaagtgta atccacagta tttataacct gtttatctta agaagagaat ttttaaaaat |
| 1261 | taccatgtga ataggcaact cattaaatga aaattaatag gaagtcattt gttatatctc |
| 1321 | ttacaacaca cattcagaag ttattattat ttcagaaggg ctggtttgga acaaccttat |
| 1381 | gaagacacag tcagtaaatt actgcataaa tcactcttca ggaaaggagg ttaccaactg |
| 1441 | aagcatttaa aatgaattat tattttgccc aggttttttt tttctttcta gtataggtag |
| 1501 | aaggctaaat taattgaatt tattattaac atatgcagtg cctaattaaa tttcagtgct |
| 1561 | ggtctattta tatttctgca acattcctta tatcttctta gcagtcattg gacaccaacc |
| 1621 | ttcagctcac ataggttact aagtgatatg aattttcata gggctccaga aaatttccaa |
| 1681 | gaattggttg ttagcttttt aattgatgaa gtggatacca gttcttttca ctgaatggct |
| 1741 | tttattcatt aaggtaatgg ggcbgttaga gttgcttagt tttcctgggg aaggggaagg |
| 1801 | aagaaaacaa agcagaatgt catgtgatat gcaactgtat taaaaaaccg aaaaggaaaa |
| 1861 | aagttgagag agatgattta accgtgagtc accggcagcc aaagcgtgag taaagcttct |
| 1921 | cacagatgaa tttagacaaa agcggagaag gtactggtga attttctgga gcctttacat |
| 1981 | tttctacagt gaaatggaga taaactttac tcatgccata ggacatgttt caaaacaata |
| 2041 | ataagatgtt ttctgaacac ttactacata ctaagcactt tatatgcttt gtctcattta |
| 2101 | atccttacac agccacattc ttctggggtt tagcgaatga tttttgtggt tgtgtcctat |
| 2161 | gcttgtcctg tctaaggatg aagttgttct aattgggtgc ccctcctttt gctttctgtg |
| 2221 | aggacttgca gaactggtgg ggtttaaaca gtaccctcac ttatctcaca gaatttcatt |
| 2281 | agctcccaga tacccctgac attctccccc tagcctagtg aagaaaatct tccatttact |
| 2341 | tgttcattct gcagtgacag ctccatcaat atacaataga ctatacatat taagtgtact |
| 2401 | gtatatacta tacatgttaa aaatctcatt cattttggtg aggcccagct aagaatactt |
| 2461 | acagtagagc tttttttttt ttcctaagca taaaagtatc tttttcaatg cagcatgaga |
| 2521 | cagagttggg aaaaccaaaa taaatagatc caatggactc cccaaagagg ataatattca |
| 2581 | tttaaataaa cacccctctc agtgttaaaa ctttctaatc aacatgcctt tgggacacat |
| 2641 | tgcaccctca aagtttacac tcccattgca acgcagcttt gtggttcacg ttttttccat |
| 2701 | tcagaatgtc attaccctgt caatgatgtt tcatcaacgt ttgcttggat gagaatcctc |
| 2761 | tgatattctt cctgatagaa atgtataagc cctgttcata taaatgaata aaagatctaa |
| 2821 | ccttactttc tcagtagtgg cttccttgga gcaaaaagca gggacctcca gagagctcag |
| 2881 | gtggatgact cttttctgtt tcttccagag ctcaacttac aattagtgca caattcattt |
| 2941 | cccagaatgt cttctttctt attgtgcctt tagaaagtta ttaagcaaac atttgaattc |
| 3001 | acagaatctt accagtgtaa gaggaatgga aaaggtaact tatcaaggta acaatcactt |
| 3061 | cgtggccagt tttttcggct cactgcaact acccctcctg ggttcaagcg attctcctgc |
| 3121 | ctcagcctcc caagtagctg ggactacagg cgtgcaccac catgcccagc taattttttt |
| 3181 | tttgtatttt tagtaaagac agggtttcac catgbgggcc aggctggtct catggcaagt |
| 3241 | tttctttgtg ttgtcatgtt attatcaatt aataggaatt tatatttcag ttctgttagg |
| 3301 | tggataaaca ctattttgca tacctaaatg tttcatttat atcagcactg gccaataaaa |
| 3361 | atatactata agcaggccgg gtgcagtggc tcacgcctgt aatcccaact tttgggaggc |
| 3421 | caacactttg ggaggacaca gggtcaggag atcgagacca tcctggctaa cctggtgaaa |
| 3481 | tcccgtctct actaaaaata caaaaaatta gccgggcgtg gcgggggcgc ctgtagtccc |
| 3541 | agctacttgg gaggctgagg caggagaatg gcacgaaccc gggaggtgga gcttgcagtg |
| 3601 | agccgagatc tcgccactgc actccagcct tggtgacaga gcaagactct gtctcaaaaa |
| 3661 | aaaaaaaaaa aaaaaaaaaa aaaaaatata tatatatata tatatattac aagccacaag |
| 3721 | ccacatatgt acttttaaat gtcctagtag ccatattaga aaacaaaagt aaaaaggaat |
| 3781 | agatgaaatt aattttaatg atttttttaa acccaagata tccaaaatat tatcatttta |
| 3841 | acatataatt aaaaatttat tgagatgttt tacattgttt ttttttttct tgacgctgtc |
| 3901 | ttggaaatct agagtgtatt ttacatttac attacatcta attcagtcta gccacatttc |
| 3961 | acatgctcat ttttttgtgt gtggttttat ggagcagaga gtttaatagg caagaaagaa |
| 4021 | aagagaaggc agaagaaaat ggctcccctg tacagagacg cgggggtggg gcgctccaaa |
| 4081 | gccaaaagag gaggtcccta agtatggtag acaccagcca ggaatatatg cagtgtctgg |
| 4141 | aggaggggat gtctgatttg catagggtca catgctcatt tttatggcta ctgtattggt |
| 4201 | cagtacagat ttagatgggg atttgctctg aacaagttgg tgattgatgg tgttcatatt |
| 4261 | ttaattgaat ttttcctggg ttctgctgta cacttgtatg tgtgttagtt tcatgtgcaa |
| 4321 | tgcttgtgtc acttttaaaa cccagatata tggcataaca tgagaatgaa aaatggacca |
| 4381 | gaaaaatagt ttggcaatgt agtcatgttt gttcctatta aatgttccct attgaccact |
| 4441 | ctatctcttt taattataac aagaatctgc cctgccagca tgcccagtta cgctgggaaa |
| 4501 | acttctgcct catttactct ggctgattct catccactta tgggtcagtg gttcattttc |
| 4561 | tagaggtcac cagcattcat acctagcata caatttcatt cattataatg aaggaatgtt |
| 4621 | ttcccttcaa agagacacaa ctagtgggct taatttttct tgatatgtca cctgtaaaat |
| 4681 | tttaatgatg atgtttaaac tctaaatgta gccatcaaga caaaaactgc aaattttgag |
| 4741 | cctcagtgtg tgtgggtggg tttctgtttc ggtaatttga aacattgcag aatatcatca |
| 4801 | aaatatgata cccaagaatc atatggtatc aatcattcct agatatactg atctattcat |
| 4861 | tgccaagata gttcaatgag ctggcaaaaa catatggaat tattttctta aaatgtgaaa |
| 4921 | aataaaattt aaccaatcat gtatcacagc ttgcaacttt agtcatactt tgaaaagcat |
| 4981 | tttaatttgg acctcatgat tgaaaattta taaaaagctg aacagaaatt agttcacttc |
| 5041 | atattttaga aaagcagagt ttctttacta aatgaggcat ttgacccaaa ttggagagaa |
| 5101 | aatgttgaaa ctacttctgt gagcaagcag gtggcttctc aaacacatgt tgggatgaaa |
| 5161 | tggttgggcc tcagggtctc agtgcctgtc actgagagtt ggcactctct atctccatgg |
| 5221 | tctcctccaa gtgtgactct tgtctcttgc tgacctgacc tgccccaagt gactcactgg |
| 5281 | tcatgaccct gcacaccttg cgtctctcct atcaccctgc cgatggcaga gctacaaagg |
| 5341 | tctttgatgt agctctgtct gatatcctgt gtttccccct atggtctgtg tggaagcagg |
| 5401 | tatgggggtg tgtaaagggg aagcctatga agttcatctg caaagactac ctggttaggg |
| 5461 | gaggagagga agaagctata tgcaccattt caccagcaag catgggctct tctgcctttt |
| 5521 | agcttagggg tcctgttgtc tagtctcact cacctattaa aacagtccag caaatagagg |
| 5581 | ttttgtttac ctcccattaa aaaaaaagca attaatggaa tagaagataa taatgtatga |
| 5641 | gaagcactat tgtgaaagaa aaaccttcaa cttctctcag ccaaataatt gcttcctcct |
| 5701 | ctgtccttcc cagaccttga tgtttgctct attatttcaa aacaactata ttataaatat |
| 5761 | ttgagaatgt gtatttccct gcaaggagat cttaatcccc aagaaggcag gagctgtgta |
| 5821 | ttattcatcc cagtgctcct tcaaaccagg gcctcagaca gtgcatggcc caaagaggta |
| 5881 | cttaataaac gtttggtaaa ctgacactat tgaaattaag caacctggat ttgaggtggg |
| 5941 | tctctgccac tcacaagaga ttacgctttg agaaaattcc atcacttcat tgattttcag |
| 6001 | ttcttgcatc tgtatatggg agacgatact aggtgatttc tgacatctct caccgtttaa |
| 6061 | atgctctgtg atctatacaa cgaggggctc gcbgttctag acaagttcct tccagcttta |
| 6121 | cagttgcata acccttctaa tcttagtcac atgatgactc cactgacaga tttttggcca |
| 6181 | ccatcattag acatgctgag ttacgtgtgc ctttgctctg atcctcaaaa ctcatgattt |
| 6241 | ttaaagtttt ctgaaatatc taccatttat caggatccag atggatttca tgaccaaagt |
| 6301 | ggatgtttct tttctctccc attacaatct tttacttttt gtgtgggaaa ttgcatgtta |
| 6361 | aagaaaggga aattgaagaa tgggatgctt tggaattctg gcaagatgga ttagtgggtt |
| 6421 | ccagaaagta ggggcagcca caaataccga aataaatgag atcgtattat tgagaaagca |
| 6481 | caaatggaag aaggtcaaaa gcaagaagaa gctgacatcc tgcttcctcc aatttttgct |
| 6541 | ttctctgttt ttccaagaaa ctcctcttcc aagccttgct gaaaaactcc actttcctaa |
| 6601 | atctaacttc ttaaactgat aatggcaaga agttaggaat gaccaatatg tttaacactc |
| 6661 | caagagtatt tgttttgttt tgttttgaga ctgggtctca ctctgtcgtc cagcctggag |
| 6721 | tgcagtggtg tgatcacagc tcactgcagc cttgacctct cctgcccaag gaatcctccc |
| 6781 | acctcagcct cctgagtaga agggaccaca ggcatgtgcc actacacctg gctaactttt |
| 6841 | aaaaaatttt tttgtagaga tggggttgcc caggcaggtc tcaaactgct gggctcaagc |
| 6901 | aatcctcctg cattggcctc ccaaagtgct ggaattatgg gcataagcca ctacgcctga |
| 6961 | cctctccaag ggcattcttt acccagaaga ggaacttggc agaacttatc ctccaattgg |
| 7021 | tgaggaatat ggagaaaatg actttaagca aaggaacttc tggttctgcc tacctaatcc |
| 7081 | agaaaaagaa gttttatttc tcccttcccc tagtaactat cttcccatat tcacataaaa |
| 7141 | aagtacagaa tcaacattgt tcaagaatta taattttact tgtaagcaca tgtgcacacg |
| 7201 | cacacccata taccttcctt ccctttaaat catcccacac cctaatagta gtaaaatcat |
| 7261 | tgacccgagc atacctggga gaggaagagg agtctgacag gggcaggttc taagtggcac |
| 7321 | tcctggaact taaccctggt gtatatgaac tttacctatt gaaggatgac tcctcaactg |
| 7381 | ttctcacaat ttgctgctct gctttctttt ctaatttctg aaggtgactc atcttcccca |
| 7441 | aggactttca gacttctcag aagaaaaaaa tattgggtgg gtctctgcca ctggcaaaag |
| 7501 | attagacttt gagaatcata aaagtatatc agtatatact cattaatatt gaattactat |
| 7561 | aattaatatt atgatattga tataatgata gaatgatatt gataaaagca atattcaata |
| 7621 | atgaatatta tttcagctgc ccacttattg ggtgcctcat aggtgccagg cattttgtat |
| 7681 | gtattatcta caacccttac atgggacata ttatgatgct gtttctcttg aagaaatatg |
| 7741 | gaaactggaa acagagaggt caccacaatt ttccaaagtc acatagctaa taggtagcag |
| 7801 | acttgggatt caaattcata tgcatatggt aaatcatgct cttcctctgc tacattttgc |
| 7861 | ccccttagaa tatgaaaaag ggatacaaag agatgaagaa aatatgtaag attatccttc |
| 7921 | aatttcacta tcttttttaa agtttttttt attatacttt aaattctgaa atacatgtgc |
| 7981 | agaacatgca ggtttgttac ataggtatac acgtgccatg atggtttgtt gcacccatca |
| 8041 | acctgtcatc tacattaggt atttttccta atgctatccc tcccctagtc ccccacccac |
| 8101 | cgacaagccc cggtgtgtga tattcccctc cctgtgtcca tgtgttctca ttgttcaact |
| 8161 | cccacttatg agtgagaaca tgcggtgttt ggttttctgt tcctgcgtca gtttgctgag |
| 8221 | aatgatggtt tccagcttca ttcatgttcc tgcaaaaggc atgaactcat tttatggctg |
| 8281 | cataccattc tatggtatac atgtgccaca ttttcttaat ctagtctatc attgatgggc |
| 8341 | atttggctta gttccaagtc cttgctattg tgaacagtgc tgcaataaac atatgtgggc |
| 8401 | atatgtcttt atagtagaat gatttataat cctttgggta tagacccagt aatgggattg |
| 8461 | ctgggtcaaa tggcatttct ggttctaggt ccttcaggaa ttgccacact gtcttccaca |
| 8521 | atagctgaac tagtttacac tcccaccaac agtgtaaaag cgttcctatt tctccacatc |
| 8581 | ctctccaaca tctgttgctt cctgactttt taatgattgc cattctaatt ggagtgagat |
| 8641 | ggtatctcag tgtggttttg attagcattt ctttaatgac aagtgatgat gagctttttt |
| 8701 | tcatgtttgt tggccgtata aatgtcttct tttgagaagt gtccgttcat atcctttgcc |
| 8761 | cactttttaa cggggttttt tcttgtaaat ttgtttaact tccttgtaga ttctggatat |
| 8821 | tagtcctttg tcagatgggt agattgcaaa aattttcttc cattctgcag gttgcccgtt |
| 8881 | cactctgata atagtttctt ttgctgcgca gaagtttttt tagtttaatt agatcccatt |
| 8941 | tgtcaatttt ggcttttgtt gccattgctt ttggtgttta gtcatgaagt ctttgcccac |
| 9001 | gcctatgtcc tgaatggtaa tgcctaggtt ttcttctagg atttttatgg ttttaggtct |
| 9061 | tatgtttaaa tctttaatcc atcttgagtt aatttttgta taaggtataa ggaaggggtc |
| 9121 | cagtttagtt ttctgcatat ggctagccag ttttcccaac accatttatt aaatagggaa |
| 9181 | tcctttcccc gttgcttgtt tttgtcaggt ttgtcaaaga gcagatggtt gtagatgtgt |
| 9241 | ggcattattt ctgaggcctc tgttctgttt cattggtctc tgtatctgtt ttgatacaag |
| 9301 | taccatgctg ttttggttac tgtagacttg tagtataatt tgaagtcagg tagcgtaata |
| 9361 | cctccagttt tgttcttttt gcttaggatt gtcttgacta ttcaggctct tttttggttc |
| 9421 | catatgaaat ttaaagtagt tttttctaat tctgtgaaga aagtcaatgg tagcttgatg |
| 9481 | ggaaaagcat tgaatctata agttactttg ggcagtatgg ccattttcat gatattaatt |
| 9541 | cttcctatcc gtgagcatgg aatgtttttc catttgtttg tgtcctttct tatttccttg |
| 9601 | agcagtagtt tgtagttctc cttgaagagg tccatcacat cccttgtaag ttgtattcct |
| 9661 | aggtattttg ttctctttgt agcaattgtg aatggaagtt cactcataag tttgctctct |
| 9721 | gtttgtctgt tattggtgta taggaatgct tgtgattttt gcacattgat tttgtatcct |
| 9781 | gagactttgc cgaagttgct tatcagctta aggagatttt gggctgagac gacagggttt |
| 9841 | tctaaatata caatcatctc atctgcaaac agagacaatt tgacttcctc tcttcctatt |
| 9901 | tgaatacgct ttatttcttt ctcttgcctg tttgccctgg ccagaacttc caatactgtg |
| 9961 | ttgaatagga gtgttcacca cctattttaa gaatagtatt gaagcctcac aaaagctggt |
| 10021 | tctcatgtaa ccatctgaga atatttggcc ttatgacttg aattcattca ttgccttttt |
| 10081 | atttcacatt ttagtgatcc tgatgtctaa atcttaatct ttgatccttg caaggtaaaa |
| 10141 | tagccaagtc aagcctgttt aataatattg gttgaggaag tcacatgctt atgatcaatc |
| 10201 | tttgggttat gtaattatat taccttaatg ttggcagttt aggtgtaagg cagagatatc |
| 10261 | tgatcacatg tgtggttagc taatttaaga tcactgccaa ctaaaatctt catggtatga |
| 10321 | tcttcaaagt tagctacttt gaccacagca atgatttcac cacagcaatt aacaaaatgg |
| 10381 | cagactcttt cctgaggtgg catgaacagt tttaaaacaa agtcaaggac caaaagaaaa |
| 10441 | gcaggcacat ggcatttgat tcatttcaaa aactagtatt gtattaagag ccaaggggat |
| 10501 | agaattgtag catcaattaa aatcttgttt gaaaaaaaat aaaaacaaac gtccattttt |
| 10561 | atctctcaaa tatattaggg ttttcataaa gttataggtg tatttttaaa aaaacaaaac |
| 10621 | tcatatacat tagactgaaa aatttgcctg tcatctcatc atgcagctaa atgcaattgt |
| 10681 | ctatggcgag atacactctt attagaggta tgatagcact aactaatagc aaactttgta |
| 10741 | cctggtagtc taatttatgc agggttcata tttcgctccc tctcagcatg ctgtaactgt |
| 10801 | ggcaaagcca ttctcaggag ttattacccc aacataatca tacccctgtg gattaggagc |
| 10861 | agttaaatgg gtcctgttat cagagacaca tatgtgccac agccgcbgtc atccctaagc |
| 10921 | caccgtgggt gattaagact cactgatggg actacctctg aataggcttg agtgaggtgg |
| 10981 | atacacttca gctgagagaa attcaggtaa ggggctgaga aaatcagatt ttgaatggtt |
| 11041 | ttatcatacc atcaggtctc cttttaagtg ctggggtcat ggatttcatt caacctgacc |
| 11101 | acatagcctt tggaagcttg gctcaatacc tgagtgtgag attatgggtg atattaaagg |
| 11161 | agatgaatgc attgagctga tgtcagagaa tgtcttttac tggattttca taatgactgg |
| 11221 | ctgcagatgg gctgagggga aagtcagatc aagagcattt ctgtaagaag aaagaaatct |
| 11281 | tccctcttat tctctttcaa gaaaatgaat agctgagcac caagaggcca aatacttttt |
| 11341 | taaaaaacac atccttttat gtagagaagg acaggttgag acgaaaaaca ggacctctga |
| 11401 | aactgtcttt atagctttaa tctaggaaga aattgcggca ccattgctga catcattatc |
| 11461 | agaggctgcc ttagttctga gagcttcaca gatggccttt tctgcatttt acatctggcc |
| 11521 | agatgaaggc aaaaaggttg atgaaaccaa aactattaga tcagtggtcc ataactctgg |
| 11581 | ctgcacttta gaatcatctg gggagtcctt aaaactactg atcctgaggc tccatcccag |
| 11641 | accaattgaa tcaggatctc tgggggtggg acctgagcat tggaatgctt taaaagttcc |
| 11701 | tcagggactc taatgtgcag ccaaggctga gaatgactga ggtggatggt ggccaagaca |
| 11761 | ggtgaggcca agagttagaa gcccttactg ttagggaagg cagaagccac aaggaggagg |
| 11821 | ggagggggaa ggagcagtat ttagcatttc ttccacacag ttggggggtt ttctgatcaa |
| 11881 | aattaggctg ggatctttcg cttccatttt catgaaggtc ttatgctttg tccacagcca |
| 11941 | cctggcctca gggcaatgag caatctgatt gatgaatttt cagtaagaaa ctgagcacac |
| 12001 | ttggctctca gccccagtgg cttcccctgt ttccaaatct gcccaccagt tacaggagcc |
| 12061 | tgctcaccaa ctggttgggt taaagaagtc ggctctgtcc ttggcaggga ggccttcagc |
| 12121 | tgtctggccc tgtctgtgac tgcgtgggtg aagctgccta atttggggaa cttgatggaa |
| 12181 | gatctaagct atgttctcta acagttttat cagaaataaa gttaactttt gacctccatc |
| 12241 | tgcctgtctc ctgtggaagg gctctgctcc ttccaaagag actctcaggg gttctcctta |
| 12301 | gaggtgtgtt atcagtccaa agatcatttt agaccagcca ttacagagga tgtccaagaa |
| 12361 | attgcacaag ggaaatagaa gtaagaatga gagcaatata tcagatagta aggaaagtat |
| 12421 | gtgactggtt tcaaataagt aattaaccat aaatccaaag ttcctgcatt agttatagca |
| 12481 | atagtcatcc acctggtcag gaaaaaaaaa gtaaaagact gagctgcaag atagaaagtt |
| 12541 | tgcctgaatt ccacgtactt caaggactac tatggaggat tccttggtcc caatgcagag |
| 12601 | acatgtactc tgaccaccca tgggccaaat ccctcttacc caccctcagt gattcctcct |
| 12661 | gggacctcac tacattgagt tcttacattc cccactcttt tcgggggaaa tataaccctt |
| 12721 | ctgctcttct catgatgtta aaaatattta gacaattact taaaatttac aacaatcttc |
| 12781 | cacataaatg atctcactta tgtttcttgt gagctctgtg atttatttct attatcatct |
| 12841 | atgctgatag ttaaggaaac tgagatatcg agaccaacat gcatagtaaa tggcaaaacc |
| 12901 | agatgaattt taaactttcc taactccaaa agccacatcc tgcccaaccc gccatgctgc |
| 12961 | cgctcagtta atgcctggct gtttgtctcc ccattggccc ctctacccat tgtgctttga |
| 13021 | tggcacactg tattccaact gcctgagact cctggttaat gccattacgt acagacttag |
| 13081 | gttgaattta ctaggatttt taagatttgt aggataagag atatgactgt tagactggaa |
| 13141 | tcagcaatag ataaaaggtt aacaaagttt cagaataaaa tataatagaa aaccccagca |
| 13201 | gatagaagta aaatgaatgg taagacaact gaaatgaaag ccatacattt agaaatatca |
| 13261 | aataaaacac agattaatgg cagacaataa aggaacatac ttagcagtta gtaaaaacac |
| 13321 | tttttacctt attcttatta ccctccagta accttttttt tttttttttt tgagacaaag |
| 13381 | tctcgcbgtg tcitccaggc tggagggtag tgatgtgatc tcggctcact gcaacttctg |
| 13441 | cctcttgggc tgaagagatt ctcctgcccc agcctcctga gtagcbggga ctataggggc |
| 13501 | ccatcactgc acctggctaa tttttgtatt tttagtagag acggggtttc accatgttgg |
| 13561 | ccaggctggt cttgaactcc tggcctcagg tgatccaccc gcctcagcct cccaaagtgc |
| 13621 | tgagattaca agcgtgagcc accaagcccg gctgtaacct attgaaaata acattacttg |
| 13681 | acatgtgaga caaattattt gtaagttaaa gagtttatgt gccttcaatg ctcccaccct |
| 13741 | tccctcccct aaaaagatta ttgagtgccc atgatgtgcc taagccttct ggtagactct |
| 13801 | gagaatgtga agagagttag aggatacttg ttcaacaacc cagaatctag cagaagtgtt |
| 13861 | ttgaaatgac cagccacttg ggagagctat gctagcatat cattcaggat gggctgggtc |
| 13921 | atgttttaat aacaagtaag tttgaacttt ataggtttga aacaaaaaag atgtgtttct |
| 13981 | tgctcacagt tcatattttt tggagattgg ctggagcttc attccaggat actgccacca |
| 14041 | tctggaatgt tgacagttac cgtaacagag aaagagttgt ggaggcbgtc acactggcaa |
| 14101 | ttaaattcgc tgacctggaa ctgacacatg ccacctccac ttatatttta ttggccaagg |
| 14161 | cttgttacac agccacatct aacttcagag aggtcaagat gagcaaatcc taccacgagc |
| 14221 | tatagatgga tgagtagcac tcattattat cacaattatt ttatttgtta taaaaactcc |
| 14281 | aagaaggaga ggtactctat gtgaggaata ggcataggaa aatcagaggg aagttcttaa |
| 14341 | agatgagcta gatttcacta gatggcattg aagaaacatt ccaagtaaat gaacagcata |
| 14401 | agcaaatgca tgaagaactt attgtggtcc tagtacagac gatgcgtgag agtgtggagg |
| 14461 | agggaaaagg taagactgga gaggaaggca ggaaccagaa caggacagac tgtgttcact |
| 14521 | gtcaggcagt taagtctatc ttgtaggcaa catgaagcct tttaaggaag gcaagcagct |
| 14581 | atgtgacagg acagaagatg gattggaaga aaatcaaaag agaagtgggg accagtcata |
| 14641 | aggctcctcc aatatttggg gatccaaacc aaagcactgg cagagaaata gaaaggaagg |
| 14701 | gaaatatttc caaaatattc aaaacagaaa ccaagagaac ttgatgacag aagatgaacc |
| 14761 | caggtttcta ctgaatggac agttgttaca ttctctgaga taaggaatac agaaggaaaa |
| 14821 | agttgagagg gaatatgaaa ttatttttaa tcatgtttaa tttgatcact tgtggaacat |
| 14881 | caaccagaga tgtccatcag ttacaccaat ttgtaggttt tgagagaggc ctgaggtaga |
| 14941 | ggcagagaag tgggaatcag cagattagcg gcagtagttg gaaccataac tgaagatgag |
| 15001 | atttcccagg gaggggagtt gaacaggaag gtagacaaag gctgagtgca gtggctcata |
| 15061 | cctgtaatcc cagcactttg ggaggctgca gtgggtagat cacaaacaag atcaggagtt |
| 15121 | caagaccagc ctggccaaca tggtgaaacc ccgtctctac taaaaaaaca caaaaattag |
| 15181 | ccgggcgtgg tggcacacac ttgtaatccc agcctcagga ggctgaggca ggagaattgc |
| 15241 | ttgaacccgg gaggcagagg ttgcagtgag ccaagatcgt gccattgcac tccagcctgg |
| 15301 | gcgacagagc gagactccgt ccccaccgac cccctaaaaa agaaagtaga caaagatgtg |
| 15361 | tcctagaaaa cactaatatg aatgggtaga gaggggagac ttgtcaagga gatcgagggg |
| 15421 | agagtcagtg aggtgaaacc ttagaggata gaccttcacc aaggaagtaa cagtcaacag |
| 15481 | gcctaaatgc cacagagatg tcaaatgaga gacactggaa atggttcttt gaatattaca |
| 15541 | gccagaacat cacaggagac catttccaaa gcagtcttga tgaagtggtg gggaagggag |
| 15601 | gtccctgaag gagctaagga gggactggga gatcatgacc cagagataag tgttgcaggt |
| 15661 | ataaaaggga aagactgaga tcaggaaata gccacaggat ccctaaggcc aggcttcggg |
| 15721 | tggggtggtg tgtgtgtgtg tgtgtgtgtg tgtgtgtgtg tataaaatgg gaagaccttg |
| 15781 | agtataattc tgtactaaga agatagagca gtagagagga aaaggctgaa gacagatggg |
| 15841 | agggtaaata gtgaattaga aaggtctgtg caaagatgag aaaggatgag tctgaaagca |
| 15901 | cagggagaag ggccagcctt ggacaggaga aaacatttct ttcactaaga ataaagggaa |
| 15961 | ggttgggtat acaccacaaa gaaggtgtag atgggtggca atggagttct gtcaagttga |
| 16021 | gggcattcca tgatagcctc acctttctct gtgaaatgag agagtttagt ttacaagata |
| 16081 | tttctgagca cttcataagc caggttcata gactgaaaga agtggaggtg gagtgtgata |
| 16141 | ggtccttaag aataggggaa gtttggaata tctgacaagg gacagagagg aaaaaactag |
| 16201 | aaaaggcttt gcagaatgtg ggcccacaga tcagaggcta aggggtcccc atttgtgcag |
| 16261 | gagagtaagg gcagggaggc aaggctcaca gcccaaaata tagagcccct caccaaatga |
| 16321 | ctgcaggagg gcagctttcc tatgagagca tccctatcac tgttttcact ccgagtcatt |
| 16381 | aacttacgac ttactcagct ctgtttcgta atagcagact cgagtaatga gggtatgaca |
| 16441 | gcctctctct gcatgccaag gtatgcagcg tggatttcct ttttcgcttt ctctctcctg |
| 16501 | tggcttaggt gccttctgtt ctgctaccag gatagagaac ccagtgacta gtttcttcta |
| 16561 | gctctctttt tctgactagg tatcttgtca gaaatttctg cttaccagac ttcatggaga |
| 16621 | gggaatcaag ctttgaatca gggttgaaaa agtagagctt aatatatata ttacaaaatg |
| 16681 | ccactcacgt tcttgaggtt accttgtatc tataccacaa ctagcattct tttagaaagc |
| 16741 | accattaccg aagtaatccc tttcctggga attcacccaa aaaggttatt cccacttatc |
| 16801 | ccccatctcc aaaataaaaa agaaaaatgt gtgtgcttag agatgttcct ggaagcatga |
| 16861 | gctgtaatac tgaaccaata gaagacgaac taacagattg cagggcatcc gtttggcaaa |
| 16921 | aaacttatgc agttatctaa atgatagtta tgaagacaat atgtataaca cattatattc |
| 16981 | tgagtgaaaa gaacagaagg tgatttcaaa actgcattgg gataatagta atataggaaa |
| 17041 | tagtgagatg aacaaagatt tcaaaggaac aaaaataaag aaaaattttg ctttttatat |
| 17101 | tggtaggcgt atgggtgaaa ttccaatttt aattttaatt tcatagttat aaaattgttc |
| 17161 | ataaaaaaag gtcccccata gacagttggg ctttgggaca aactaacaga aacagagtag |
| 17221 | gaagaaaatt catcttcctt caatcccctt tctctgctta aaacaaaaca aaaaagagct |
| 17281 | ttgtcatgtt caggtgtgca acgaattctt tttccaaatc tggaacttta catctgctat |
| 17341 | taaacaggag tcagtttcca tgtaacatgt tgacaatccc ccaagtgtgt tggaataatt |
| 17401 | ttttttaatg aggagatttg aaattccatt tcaattgcca acctgcctct ttcaacttct |
| 17461 | aaaaacaaag taaaacaaaa caaaaacaca ctgggtccta tcaccccctc ttgctactac |
| 17521 | tattttatct ccattgccct gaattctttc caaacttctt tccacccagc tttgatttgt |
| 17581 | tttcagtcgg gtttattgag gcataattta cgtacagtaa aattcatcct tcttagattt |
| 17641 | agaggtctat gcattttgac taatgcatat tggcttataa tgactaccac aacaaagata |
| 17701 | tagaacacac ccatcactcc cgggttctcc ctgtcccttt tttggtccat ctcctctcct |
| 17761 | acccccaacc ccttggcaac cactgatctg ttttctgtcc ttatcatttt gctttttcca |
| 17821 | ggatgttgta tataaggaat catgcagcat gcagcctctc gagtctgact tcttccagtt |
| 17881 | agcacagtta tttaagatct atccgagtta ttgtgagtag cagcatcttt tttattgctg |
| 17941 | actagtattt catcacatgg atgggccaca acttgtttat ctgttcacct gtcaatggat |
| 18001 | actaagttgt ttccagtttt tggcaaatat gaataaagta aacatttgca tacagatttt |
| 18061 | tgtgtggaca catgttttca attctcttag gtaaatactg agcaatggga ttgctgggtt |
| 18121 | atatgttaag tctatgttca gttttctaag ttctgaaaca attggatatc tatatgcaaa |
| 18181 | aatacaaaat taaccttgac tcaaacttgt accatacaca aaaaataacc tgaaagagat |
| 18241 | cacaggtgta aatgtaaacc tagaactaaa aacttcaagg agagaaacat agcagaaaat |
| 18301 | atttgtgacc ttgcattagg caaagacttc ttagatttga catttgaaac atgatacata |
| 18361 | aaaaatcttg ataaattgga gttcataaaa ataagaacta ctcttcaaaa gacactgata |
| 18421 | agagaatgaa aatacaagcc acagacagag aaaatatttg tgaatttctt atctgataaa |
| 18481 | gggtttgtat ccagcatgca taaagacttt tcaaaactca ataataaaca atccaataag |
| 18541 | aaatgcacaa aagatacaaa cacatcatcg aaaatgacct atgaaaggca aataagccca |
| 18601 | caaaaaaatt ctcaacatca ttagacactt gggaaatgca aattaaaaca acactgagat |
| 18661 | aaactacata tctattaaat ggctaccact ttaaaaacct gtcaagtgcc agccagaatg |
| 18721 | tggaacaagt aggactctct tacattgcta gtgggaaggt gaatggtaca gccactttgg |
| 18781 | aaaacactcc gcagcttctt atagttacac ataggacctg ggggtagagg atggattgac |
| 18841 | tgtaaagggg caaaacttcc tggtaggggt ggggaaagtt tttagaaggg tgaaattgtt |
| 18901 | ctatatcttg attattgtgg tggttacaca actgtctgca tttgtcaaaa ctcacagaac |
| 18961 | tgtacactaa aaaggtatat ttttatgctc tgctaatttt actttaatct taaaaatagg |
| 19021 | aaggaaaaaa taaaatcaat gccactgtgc gactttgggc aagttacttc acttctctgt |
| 19081 | gccttggtct tttgaaatct atacattaag gataaaataa taccttcctc atactgttag |
| 19141 | aattaaatgt gctaatttat gttttatata tataaagtac ttggccgggt gtggtgactc |
| 19201 | acacctgtaa tcccagcact gtgggaggcc gaggtgggca gatcacttga ggacaggagt |
| 19261 | tcaagactag cctggtcaac atggtgaaac cctgtctcta ctaaaaatac aaaaattagc |
| 19321 | tgggcttggt ggtgcgtgct tgtaatccca gctacttgag tggctgaggt gggaggatca |
| 19381 | cttgaactcc agaggtggag gctgcagtgg gctccaccca ctgcctgggt gacagagcta |
| 19441 | gactccatct cgaagaaaaa ataagtactt gaaacatagc aaatgtttta taattattgg |
| 19501 | cttttttttc ttattgttat tacttgcatt attgcbgttt gaagaagttt ggtgataatg |
| 19561 | gagagaaaag ggcaattagg ggtctgggat ggtttaagta tgaggagacc gagacacatt |
| 19621 | gactcagagt gaagaaatca aagataagag aatgaaagaa agggagggta attctgaacg |
| 19681 | cacagacaaa gttatgttac taacgtggca tcggcbgtgt gttgtaataa ataactccct |
| 19741 | ttcacttgtc aatagctaat caaatacttt ctggagacca gaagtgactt gctggatcaa |
| 19801 | tgacaactcc tccacagatc aaaatgttca aatccttttt ctgtgttgta atcctaaatc |
| 19861 | taaaagaaca gagagaccaa gcaaatctac ctcccaacat cattaaagtg acaactctca |
| 19921 | gtatttattt gaatggtctg ctctcagctt caaccaagga aaagtcaaat tagtgttggt |
| 19981 | cagaaaacag aagggtgtta cgagagttct ggctggtcat tacagacttg gggatttttg |
| 20041 | attaaaagaa gaagaagaag aagaaacctg ataaagtgta aatatagcaa gcagggatta |
| 20101 | gtgtcctgct gggtcatgtt ctcacaacag tgagaatttc agagatttca taagaattaa |
| 20161 | actgctccac atgacaattt attttacctt ctggcttttc caggaggcaa atcagtgcaa |
| 20221 | cttctttctg cctttgtttc aatttggtaa caaccctcaa ttttaggaca ggctaaacct |
| 20281 | agccacccta tcagagatga tgaagtagcc atctttttaa caggtgggga gatgaatgga |
| 20341 | atcagggttt gtttgtttgt ttgtttaata actgctagta aaaaccaagt caatagctga |
| 20401 | ctgagtgtaa gggaggctcc agaaggcagg ttattgtagt atagatgtga ctcgacttat |
| 20461 | gatgatgtta cttcccgata aacccgtcat aagttgaaat atcgttaaat tgaaaatgct |
| 20521 | tttaatacac cgaatctacc gaacatcata gcttagctca gcctacgtta aatgtgctca |
| 20581 | ggacgcacat tgcctacagc tgagccaaat cacctggcaa cacaggacac tgtagagtat |
| 20641 | cggttgctgg cccttgtgat gctgtgactg actgggagct gcgcttagtg cctctaccca |
| 20701 | gcattgagag tttcttatcg cttattacta gcctgggaaa agaccaaaat tcaaaactca |
| 20761 | aagtgcggtt tctaccgaat gcttataact ttcagaccat catgatgttg aaaaatcgaa |
| 20821 | ccatcgtagg ttgggatcca tcctataaga cgagctacac tgccggaagt gtaagactgc |
| 20881 | tatgctgccg gaagatgggg catagtggac aactgcaagt cctgacaaca ggaggtcagc |
| 20941 | atctgcgacc tttaacatcc acattgacac taccacagtc ttccaaacag agctgatgat |
| 21001 | atagtttgga tgtcgtccct gcccaaatct catgtcgaat cgtaatcccc agtgttggag |
| 21061 | gtggggcctg gtgggaggtg attgggtcat gggggcagag ttcttatgaa tggtttagca |
| 21121 | cggtcccccc ttggtactgt atagtgagtg agttctcatg cgatctggtt gtttaaaagt |
| 21181 | gtgtggcacc tcccctctct ctctttctcc tactctggcc atgtgaagtg ttggctcccg |
| 21241 | ctttgccttc caccatgatt gttaaattcc cagaggtctc cctagaagct aatgctgcca |
| 21301 | cgtacagcct ggagaactgt gagccaatta aacctcatct ctttttaaat tacccagtct |
| 21361 | caggccgggc gcggtgactg acacctgtaa tctcagcact ttgggaggct caggcaggaa |
| 21421 | gatgatttga ggtcaggagt tcgagaccag cctggccaac atggtgaaac cccatctcta |
| 21481 | ctgaaaatat aaaaattagc caggcatggt ggcgggtgcc tgtaatccca gctacttggg |
| 21541 | aggctgaggc aggagaatcg cttgaacctg ggagtcagag gttgcagaga gccaaaatgg |
| 21601 | agccactgta ctccagcctg ggcaatggag tgagaccctg tctcaaaaaa tatatatata |
| 21661 | ttacccagac tcaggtattt ctttacctga gactatgaga gaatggacta atatagctga |
| 21721 | agaattttat tttattttta aaaaactttt acgtttgggg gtacctgtaa aagtctgtta |
| 21781 | cataggtaaa ctcctgtcat gaggatttgt tgtacagatt ctttcctgct cctccccctc |
| 21841 | ctcccaccct ccatcctcaa gaagatccca gtgtctgttg tttccttctt tgtgttcgta |
| 21901 | agttctcatc atgtagctcc cacgtataag tgagaacatg cagtatttgg ttttctgtcc |
| 21961 | ctgtgttagt ttgctaagga tgatagcctc caactccatc tatcttcctg caaaagacat |
| 22021 | gatctcattc atttttattg ctgcatagta ttccatggtg tatatgtacc acattttctt |
| 22081 | tatccagtct gtcattgatg ggcatttagg ttgattctgt gtcttcagaa ttgtgaatag |
| 22141 | tgctgcaacg aacattcgtg tgcttgtgtc tttatagtag aatgatttct attcttctgg |
| 22201 | tagtaatggg attgcbgggt caaatggtcg ttctgctttt agctctttgc agaatcacca |
| 22261 | tactgctttc cacagtggtt gaactaattt acactcccac taacagtgta taagtgttcc |
| 22321 | cttttctctg caaccttgcc agcctctgtt atcttttgac tttttaataa aaaccattct |
| 22381 | aattagtgtg atggtatttc attgttgttt tgatttgcat ttctctaatg atcagtgatg |
| 22441 | ttgagctttt tttcatgttc gttggctgca ggtacatctt cttttgaaaa gtgtctgctc |
| 22501 | atgtcctttg cccacttttt aatggggttg tttttctctt gtaaatttaa gttcctcata |
| 22561 | gatgcbgggt attagacctt tgtcagatgt atagcttgca aatattttct cccattctgt |
| 22621 | aggttgtctg cttactcttt tgattgtttc ttttaccatg cagaagctcc taagtttaat |
| 22681 | tagatcccat ttgtcaattt ttgcttttgt tgcaattgct tttggtgtct ttgtcatgaa |
| 22741 | atctttgcca ggtcctatgt ccagaatgat attgcctagg ttgtcttcta gggtttttat |
| 22801 | agttttgggt tttacattta aatctttaat ccatcttgag ttgatttttg tgtttggtgt |
| 22861 | aaggaagggg tccagtttca atattctgca tatggctagc cagttatccc agcattattt |
| 22921 | attgagtaag gagtatctcc tccgttgctt gtttttccca ggtttgttga agatcagatg |
| 22981 | gttgtaggtg tgtggcctta ttttggggct ctctatcctg ttcatttggt ctatgtgcct |
| 23041 | gtttttgtac cagtaccatt ctgttttggt tactgtagcc ctatagcata tttcaaagtt |
| 23101 | gggtaacatg atgcctccag ctttattctt tttgcttaga attaccttgg ccatttgggc |
| 23161 | tctttttggt accatatgaa gtttaaaata gttttttttc tagttatgtg aagaatgtcg |
| 23221 | ttggtaattt gataggaata acatgtaatg atattgattc ttcctatcca tgagcatggg |
| 23281 | atgtttttcc atttgtttgt gtcttctctg atttcttcaa gcagtgtttt gtaactcata |
| 23341 | ttgtagagat tattcacctc cttgcttagc tgtattccta ggtattgtat tctttctgta |
| 23401 | gtaattgtga atgggattgc ttttctgatt tggccctcag cttggtattg ttggtgtata |
| 23461 | ggaatgctag tgattttttg tatcctgaga ctttgctgaa gttatttatc agctgaagga |
| 23521 | gcttttgggc tgagactagg gggtttttta gatatagaat catgttctct gcaaacagat |
| 23581 | ttagtttgac ttcctctctt cctacttgga tgccctttat ttctttctct tgcctgattt |
| 23641 | ccctggccag gacttccagt accatgttga ataggcgtgg tgagagaggg cattcttgtc |
| 23701 | ttgtgccagt tttcagggag aatgcttcca ccttttgccc attcagtacg atgtttgtgg |
| 23761 | tggtttgtca tatatggcta ttattatttt gaggtgtgtt cctttaatac ctagtttatt |
| 23821 | gacagttttt aacatgaagc agtgtttaat tttattaaaa gtcttttctg cctctgttga |
| 23881 | gatagtcatg tggcttttgt ctttagttct gtttatgtga tgaatcacat ttgttgattt |
| 23941 | ccttatgttg gaccaacctt gcatcccagg gatgaagcct acttgattgt ggtggtttag |
| 24001 | ctttttgata tactactgga ttcagtttgc aagtattttg ttgaggattt ttgcattgat |
| 24061 | gttcatcacg gatatcggcc tgaagtttct ttttttgttg tgtctctgtc aggttttggt |
| 24121 | atcagaatga tgctggcctc ctagaatgag ttggggagga gttcctcctc ctcaattttt |
| 24181 | ttggaatagg ttctgtagga atggtaccag ctcttcttta tacatctggt agagtttggc |
| 24241 | tgtgaagcca tcaggtcctg ggatttttta gttggtaggg tatttattac tgattcccta |
| 24301 | aatagaccga taatgatttt agaagtggag tcggtttttt cctggtccag tcttgggaag |
| 24361 | gtgtatgtat ccaggaattt atttagctct tctaggtttt ctagtttgtg tgcatatggg |
| 24421 | tgttcatagt agtttctgat ggttgttttt atttccgtgg gatcagtggt aacattctct |
| 24481 | tcatcatttc tttttttttt tttttttttt ttttttgaga cggagtctcg ctctgtcgcc |
| 24541 | caggctggag tgcagtggcg cgatctcggc tcactgcaag ctccgcctcc cgggttcacg |
| 24601 | ccattctcct gcctcagcct cccgagtagc tgggactaca ggcgcccgct accacgtccg |
| 24661 | gctaattttt tgtattttta gtagagacgg ggtttcaccg tgttagccag gatggtctcg |
| 24721 | atctcctgac ctcgtgatcc gcccgcctcg gcctcccaaa gtgctgggat tacaggcgtg |
| 24781 | agccaccgcg cccggcccat ttctaattgt gtttatttga atcctctctc ttctcttctt |
| 24841 | tattaggcta gctagtggcc tatctatctt attaattttt tcaaaaaacc agctcctgga |
| 24901 | tttcttgatc ttttgaatgg tttttcatgt atcaatcctt cagttcagct ctgattttgg |
| 24961 | ttatttcttg tcttgtgcta gctttggggt tgacttgttc ttgcttctct aattctttca |
| 25021 | gttctgatgt tagtttgtta gtttgagatc taactttttg atgtggacat ttagtgctat |
| 25081 | aaatttaact cttaacactg ccttagctgt gtcccagaga gtctggtatg ttgtatcttt |
| 25141 | gttctcatta gtttgaaaaa acttcttgat ttctgtctta atttaattat ttatccaaag |
| 25201 | tcattcagga acatgttgtt taatttccat gtaattgcat ggttttgagc gattttctta |
| 25261 | gtcttgactt ctatttttat tgtaccgtgg tctgagggtg tttgatatga ctttggttct |
| 25321 | tttgcatttg ctgaggattg ttttatgtcc aattatgtgg ttgattttag agtatgtgcc |
| 25381 | atgtggtgat gagaagaatg tatattctgt tggttttggg tacagagttc tgtagaggtc |
| 25441 | tattagatcc atttggtcca atgttgagtt cagatcctga atatctttgc taatttcctg |
| 25501 | cctccatgat ctaatactgt cagtaaagca ctgaagtctc ctactactat tgtgtgggag |
| 25561 | tctatgtctc tttataggtc tctaagaact tgctttatga atctgggtgc ttctgtgttg |
| 25621 | gatgcatata tatttaggat agttagatct tcttgttgaa ttgaaccctt taccattatg |
| 25681 | taacgccctt ctttgtcttt ttttttcttt gttggtttga agtcttcttt gtctgaaatt |
| 25741 | aggattgcaa cccctgcttt tttctgtttt ctgtttgctt ggtagatttt cctccatccc |
| 25801 | tttattttgg acctatgggt gtccttacat attttatctt tatctatcca tccagccatc |
| 25861 | cagccatcca ttcatccgta tcatttttaa ccaataagga cttttaaaag cgcaaccaca |
| 25921 | acaccattaa cataaccaat aaaatctata acaatgataa aatatcatct aatactcagt |
| 25981 | ccatgtccaa ttttccctcg ctatctcaaa atcgtcttct tagaaatggt ctgttcaaat |
| 26041 | gagatcacat ggacagagga aggcgaacct cacactgtgg ggactgttgt ggggtggggg |
| 26101 | gaggggggag ggatagcatt gggagatata cctaatgcta gatgacaagt tagtgggtgc |
| 26161 | agcgcaccag catggcacat gtatatgtat gtaactaacc tgcacaatgt gcacatgtac |
| 26221 | cctaaaactt aaagtataat aataaaaaat aaaaataaaa aaataaaaag tgaaaaaaga |
| 26281 | aaaaaaaaaa aaaaagaaat ggtctgttca aatcacaaac cagattcaga aacaatagcc |
| 26341 | atacattaca ttttattaat atgtctctta aatttctttt aatctattac agtctttgga |
| 26401 | atttttatgt cttcgtttat ccttccaatt attaaaaaaa aagtattttt gtattcattg |
| 26461 | aatagacaat gcttgcagaa aagtaaaaaa aaaaaaattt agtacaaaaa ggtacatagt |
| 26521 | gagcbgttcc ttagtctccc ttcccagaag caatgttacc acttttgtac aaatagtctc |
| 26581 | tgcctagaca cacatgccag tccctaaggt ggctgtaaca aggtggttaa gagtgagaac |
| 26641 | atgaattcaa attcctatta tgccactcac taagtataaa tcttggtcat ggtacatgcc |
| 26701 | tctgtgcctc agtttttaat aatggtacct acctcatagg gctgttgaga gaattaaatc |
| 26761 | agataagtgc ttaaataact attaatattt attattattc acattccctt ttggcttttt |
| 26821 | tcccaaatag cagagtggtg cacatatgtc ttcatttatt tggcttgttt tttcacctca |
| 26881 | catcacattt tgatgaataa ttccatacat gttgttatag atttgcttca ttctttgtaa |
| 26941 | tcattgacta atattccatt gtatgaatat gctactgcta aacatgtacg ttatttccaa |
| 27001 | cctcttatta tcaagaaatg ctgcaatgaa tatccttgta atactttagt ggattcatgt |
| 27061 | gcaaaaatat tcataggata aaatcctgaa agttaaattg ctgagctaaa gggtatgtgc |
| 27121 | attttaatgc tttatagatt gcccagctgc ctcaaaggag gttataacaa tttacactcc |
| 27181 | caagaaaaat gcacaagggt ccccatttcc ccatacccta gctaacacag gatattgcta |
| 27241 | aatgctttca tctttgtaaa catgatgtat tgaaaatggt atctcaaagt tttaatgtgc |
| 27301 | atttttctga ttgtgagaag ataaaggaaa tgtagtacaa ctaaacatca gcagtcaaat |
| 27361 | gacctggcca tgactcctga gtgaggacac tggtaaacac catcaggatc caaacacctc |
| 27421 | tgtatttacg aagaggatgc tccctattgg atagcactaa gcttatttca tgtatgtaca |
| 27481 | tatgtagtta gttaattaca tccagcggtg gcaaagggct tgttctgacc caatgaaact |
| 27541 | ttctctcctg gcccccttcc agcatgtggt caggagtaga gtgttgtggc catgaggcat |
| 27601 | gcatttgtac agatgactac ttactcctcc ttgaaacatt tttttccatt tgcttccctg |
| 27661 | ctgtctcact catgggtctg ctcctaattc acaaatcact cttttcccag tcttcttggt |
| 27721 | tgggttttct cctcttctgt gcttgtagac atgggggagc cccagggctt ctctcttgaa |
| 27781 | ctacagcttc tccctgggtt catctccttg ggatgtctgt tccaatgggt ttaaatacta |
| 27841 | gggctaggac tagggagagg tcattgaggc acttagcaca taaagtttaa ggaaacattc |
| 27901 | tttatcaggc ccatgcaagt gcaggactgg ccctggaggg tgactaccac cttacctttt |
| 27961 | ccaccctagg caccttgttt gccttaccct agccccagtc ctctttaaca ccccagtctt |
| 28021 | ctccctggac ctccagaaac ataaatccta tttgacattt ctacttggag gttttaaggt |
| 28081 | aactcaaacg taaaatatct aagacagaac tcttgcatca cttcccatcc tggggcccaa |
| 28141 | gcctgtctct tctactagtc tatctcagtt aacagcatca ccatttattc agttgctcag |
| 28201 | gacaaaaaat ttgaagtaat ccttgactct tctttttttt tttttgagac ggattctcac |
| 28261 | tctgttgccc aggctggagt gcagtggtgg gaccttggct cactgcaacc tctgcctcct |
| 28321 | gggttcaagc aattctcctg cctcagtctt ctgacctcgt gatccactcg cctcggcctc |
| 28381 | ccaaagtgct gggattacag gcgtgagcca ccgcacccgg cctggattct tttttttttt |
| 28441 | tttaaacaag tcctatcttc catctccaaa atgtatccca aatctgacaa cctctcccac |
| 28501 | cgtaggccag cccccatctc tcccctctga aaatagcctc ccttagatct ctggacattt |
| 28561 | gttcttcccc acccccttgt gatcactatt cagcattcag aatgatcttt taatattatg |
| 28621 | aaggagactg tgttcctctc ctacttaaaa ttctctagtg gcttcctaat aaatttagaa |
| 28681 | taaaaagcca actcctcgcc atggtcacca ggccaggatc cagtgggtac aacaatctgt |
| 28741 | tcccagcaca ataatcccac ttctgcctcc ccaccattca ccaggctcca ctgcactggc |
| 28801 | tcattcctgc ctcagttgtg cttcttttcc ctggaaagtt ctttctgtag atctttaaag |
| 28861 | ggtgatttcc ttctcaacat tcaggtgtca gctcgtttca ctttcctgac catgcccatc |
| 28921 | cactcagaga tcactcaaaa tcccattacc ctattttatt tctccatcat atgtatcact |
| 28981 | atctgaaact atcttgttgt tgatgcaggc tattttcttg accccttcat gggactccca |
| 29041 | acaggggtac cccatttact cagcctgccc tgctcaacct cttgcaggag ggagcacacg |
| 29101 | agtgaacgag tgcaggaacc agctggctgc tttagtgctg tgaggagtaa actccatgca |
| 29161 | ggccctgcag cagcaaccag gtaggggtgc ctgcaacccc agggccccag agggtgtgtt |
| 29221 | acaatgctct cgtagctctg ccatctgtgg acagcagtgt gttgtcagct cagtgggccc |
| 29281 | tttgcttcat catgtagggt ggctgccctc tgcctgtgag ggcaaagggc cagggtgaca |
| 29341 | gtctttttgg gtacccacaa tttgtgcatc ctgaattctt gtttggtgcc caagaagaat |
| 29401 | ggggtcacac agatgaactg aaggatggtg aatgcagaga attagcaatg aaagtggctc |
| 29461 | tcagcagaga gagaagctga aaagggaatg ggaagggcag gtcactctcc cctgaagtca |
| 29521 | agtcacatct ctccaatgtc cagccaccat ctctgaagtc aagtttcctc tctctgatgt |
| 29581 | ccagccactt ctcctctcta ctggctgagt ctggggtatt tataggcaga ggataggtgg |
| 29641 | tggggcaggc catacataat tttggaaaag gcaacattct attggtaaaa agacattatt |
| 29701 | cataaagaac caattgggaa agagcgggca cacagggatg gaagttctca ctttgggctg |
| 29761 | caggtttcag gcttttcagc tcaaaagtga ggtttttcca gggacctgcc ccgtctgcct |
| 29821 | aaaatttcta cacttctgtc attgataccg ctggataaca gctctcctat aaagttcagg |
| 29881 | ggcttaaaac aaaaatttac taattcaccc ggacagttct tgatagggtc tctcctaact |
| 29941 | gttgcagtta catagcaact gggttggagt catcttttct gggcttgaca tccaggacag |
| 30001 | cttcttccct tgtgtgtctg gtgcctcagt gctcctccag gcagcctttc tctccagaag |
| 30061 | agtagcctgg acttcttggc aactcaagct tccaaaagaa aaaaaagcag agactgctgg |
| 30121 | ttctcttatc aaacaggcct ggaactggca caatgtactt ctgctgccat attcaggagg |
| 30181 | tcaaagcaat cgaaggccaa tccaagttca aaggcattgg agaaaaatga gaagtgtcac |
| 30241 | ttaaatgaga agtgacacat gcgtaaaagg gggaaaagca ttgattgtgg ccatttttgg |
| 30301 | agataagcta tcacgtttat ttgtttgttt gctttctaat ggtctgtctt ctcccattag |
| 30361 | gttataagct ctgtgagaca acaggaatct tgtccatctt gttttatggc tctacttcca |
| 30421 | acacctagaa taatgcctgg cacatagtag gtgctcagtg aataacttaa gcacttgata |
| 30481 | catgtttggg gaactaaaat gaacagaatt aaacttcccc agattggtcc tgccagattt |
| 30541 | gctgatgcca agcatgctga tgcctcacca gatgaaagaa gccctaaaat gtagggtttc |
| 30601 | gctttctctg caaacaagaa aaacttgccc tgaacacaaa atctagaaat agatttggcg |
| 30661 | tgttttctac attgaaatat ttcccgtagt accagaaatt attttcccac agctttgtgc |
| 30721 | tacattaaaa tattgaagtt gactgaaaat atctccattc tttaatcttg gtgtagacta |
| 30781 | gaaacaattt ttttgtaaca aagtaaatat gaaaacttcc taatatttga actccccaga |
| 30841 | tatccccaga tatctccaaa cttaaaatat cattgcaagt taagataaat ttttttaaat |
| 30901 | gactaccgag aaaggtcatt aaaggcttgg ttattaaaat gtacagattt gggttataaa |
| 30961 | gccagaactt atttgtttaa atcattacat atgaccaagc acagaaaata aattacctca |
| 31021 | aatctcctct ttgctaattt ttactggtaa actctataaa atgatcctat ctttaaacct |
| 31081 | ttttgtaaac cccttataag ttagtaagtg agaatgtatt catcagaagg attttagtga |
| 31141 | tgtttgaaat taaaaaagag agatttgatt tttaaaatta tacttgcaga ctactgctaa |
| 31201 | tgaaacttct tctaacccta gttttgtctt atcttcagtt tttccagatt tgctcaaagc |
| 31261 | aatcccagtg agcatccacg tcaatgtcat tctcttctct gccatcctta ttgtgttaac |
| 31321 | catggtgggg acagccttct tcatgtacaa tgcttttgga aaaccttttg aaactctgca |
| 31381 | tggtccccta gggctgtacc ttttgagctt catttcaggt aagtacaaaa ttctacctct |
| 31441 | gaagacaaat gtgcttttca atatgtcaaa aagaccgtct acctaaatat aaagttataa |
| 31501 | tcttaacata tatacatgga tgcacactgt agtattatac ataataacaa aaagtgtgga |
| 31561 | aataccacac ttgctcaaca gtagggaatt caataaatac tttatggaca tctatatgaa |
| 31621 | taactgtgat gctgacatta aattatattt ttgaagatgt aatcaagagg ataaacgctt |
| 31681 | gtctcaaaaa gttacatggg aaaagcagta tgtaaactta tataaacatt gtgaacctaa |
| 31741 | tttgattata tatataaaat atagggaata tacatataaa atacatatat gtatatatgg |
| 31801 | gggctatata tatatatata tgaaagagat agatagatag atagatagat agatagatag |
| 31861 | acagacagac agacaataca gactccaatc tgttggtcgt ggttgtctct gacccatgac |
| 31921 | actatggggg acttttattt ttgctcatac ttttcaatat ttcttagtgt tcaataatgt |
| 31981 | gctattattt atacataata ataaaaataa ataaatggca tcaaaaaaga gtaaagggcc |
| 32041 | agtgttccgc ccacatatga gcagccatat tcaagcctgt agacactttg tgtagcctaa |
| 32101 | tgctaggtgt atctgggcaa ggataaactc taaagccaga aattagttca tcaataaaca |
| 32161 | tgtgctactc aatagctagg gctgatggaa aagaatataa aacccagtct gtgccaaatg |
| 32221 | gtgcttacta tctgcaagtg ggagaaggag aaagacgaga aaatgaaaaa tgtgtgtata |
| 32281 | atttatatgt agcbgttctg taggagatct ctgacttcac cccattctaa ctttgcaaaa |
| 32341 | agatccaaca ctttgtcaga ttcctgggag gcaagtaatt ttattgatgg tttcatggag |
| 32401 | ggatacagaa cgataacaac tcacacaaag caaacaatgt aatgaaaatc tctattcgac |
| 32461 | tgtttctttt tctcctgaag ttgccctttg gctgccagct accaggcacc aggctcaagg |
| 32521 | tactttcttg ctcttgacac tactcccttc tctcatacaa ttcaacccca accacaaacg |
| 32581 | tgtatagatc tctctctcta taaaacaaag gcctgtagtt aacaggaggt cacttgcagt |
| 32641 | gtagcctctg ttcattgtta cttgtgcaca ctgcttaggg tctcacccca tccacattct |
| 32701 | gctaatcaca ttattcaccc atccaatgta gatctctcca gtggagattc tgctaatatt |
| 32761 | ttctttagat ttgtcacaag tatataatac agttttaaat tgtacagatg attatcctat |
| 32821 | aacagaagag tctaagcctt ttacatcttt gtatctctaa cgaaagcatt cagcatgaag |
| 32881 | ctctgtacac agcagacaat tcaatatgaa tttgctgact tgaaacagca agcctagaaa |
| 32941 | ggagatgtta acttggtcac ttagacagaa caggtttcag caatcagaat tcagatgaca |
| 33001 | tggaactggt agaacaggcg ctttgaagca ataggacatg agccagtgag gagagggatg |
| 33061 | gaatatcata aacaaaggcc aagggctttg caatcagagc tgaagagcca agagcacagg |
| 33121 | ctcagggtgt gggcagactg aatgagaaag tgattcaatc acatgtgaaa gtccagatga |
| 33181 | gaagagagag ttgggattac ttctgctcac caaacatcca aaaccaaaca ggtggatccg |
| 33241 | ggtggtgtgc tgttttactg atgaccatta cacagaattt taacagaagg aatgtaaagc |
| 33301 | agtggttctc aaactggagt tcccagatga gcagcgtctg catcatctgg aaacctgata |
| 33361 | aagcagcaaa ttctcaggcc ctaccccaga cccactgaat cagaaacttg ggggtctggg |
| 33421 | ggaagatggc catctgtatt ttaacaatct cccttcagga gattctgagg ctggctcaag |
| 33481 | tttgaactac aggtagttgg ttcaacaggt gttggtggac tgacaaacaa aaagagactc |
| 33541 | cgaggtaact ccaagatggt aatgtcagaa agcagctacc acccctaggg cttgggggaa |
| 33601 | ccaacaaaag agtttggcat tgccagaacc tagaatcttg aggagaggcc ccagagcatt |
| 33661 | gtgtctcaga ccttgaggac ttggcactgg gacaccatga ggggtttctg ggtgtgggaa |
| 33721 | agggctggaa actccccagt tgctgccacc agggagaact acaagtgaag tggaaggtgt |
| 33781 | gggcctttct cccttttctt ttctcgtctt ctctctcccc ctggtgctca tgtttgacag |
| 33841 | aaaacagctg aaaaggcaga actagtttgg ggagtcttga cctggcatca taaagcagag |
| 33901 | aaaagcaaag ctggagtgaa ggtgagacac aacagctcat tagcagcaac agccgtctag |
| 33961 | cgctccagct tctgaatgaa attctgaaga acagcgcact tggaagacaa attatttgac |
| 34021 | agttctgaca gacgaccaaa ctaacagcat ttgaaaagca agatgactca gagaatacag |
| 34081 | aatttaatcc aaatcccaga tcctatctct gcctttggcc aggcctaatg caaggagaac |
| 34141 | ctgagcacac aaatatatgc aggaatgatc aggacctgtg cctgcattct attctgtctc |
| 34201 | acccaccttc aaatttgttg taaaaacatg ggctcaataa aggtttgtga atcagggaag |
| 34261 | gaagagaagg ggagaaagga agggaaggag ccagctccag atctgtgtct tgcagaggat |
| 34321 | aaaggccagt gtttttagat cacccagtgt ttttctaagc ccccaatact tattttgaaa |
| 34381 | tatcaaaatg ttcaataact aaaaaaaaaa ccgttacaac aataaaacat gtttgagggt |
| 34441 | cagatggact ggcagtttgt gacctctggg gataaacagg tcactttgga atcacagact |
| 34501 | tcctcattcc ccttaaatct catatggtac ccagaagccc ttggaacttt ggaaggtgtt |
| 34561 | tattcacagt tgtaatgtcc atgcagaccc tggctctaag acccaattgt gtaagggtag |
| 34621 | gtttgtagcc cttatcccaa acattctaag tgtgagccaa tgcgtcacac actcagaggc |
| 34681 | cagagactgt attggggtcc tttatttcac gtacgagtca cattccatta agagacccca |
| 34741 | gaagtcagct ctcttccact gactggttct cttcccttgt ttctcttgcc aatgtgtgct |
| 34801 | gcccaggtgg cagtgctcac tgtcagcaga gaagaaaaat gctttcctcc ttggacctct |
| 34861 | tttctctttt tctcctccct actcacattc aggttcccta agcttccccg ctccttgtgc |
| 34921 | tgaagtcatt ctatggtcat ttcttcaact gtctacttcc ctgctggatg ggcacccaag |
| 34981 | acttggcatc ctggggcatg tagaaagggg aaagggaagg gaagggaaaa gaagtcctcc |
| 35041 | caattgtcta tctggacctt tccacactgc ccagagtact gctatgggca tctccttatg |
| 35101 | tctcccgatg tggtgcatgc cagaccctgc aggtagaaaa ggaaagaaag caacccattg |
| 35161 | gaccaggcca gcaaaggctt cagtcacaca gctggctcat acttatggct tcatattctg |
| 35221 | ttgcctcttg aaccagacat ttcttccact ctcataacct ccagtttagc tcgtattcct |
| 35281 | cagcattctc catgtaatat tgttgcatga aacccatgca agtcagccaa tttgctcttt |
| 35341 | ctcatcttgt catttataaa ttgatgctga gaagtctttt tcccaaggtt tttagtaata |
| 35401 | ccttcatcat cccccatagt tcattttggg cagtgattcg cttctttgac tgtacattag |
| 35461 | aatcatctga agaactttct aaaactactg atctcaggtc tcacacaaca ctaattaaat |
| 35521 | tatagtctct ggtggggtag ggcttgggca ctgctatttt accttaagct ctctggagtc |
| 35581 | attctaattt gtagccagtg ctaagggttg caatataagt gaatatattt cacgtatttg |
| 35641 | tcaaacattg actgagtgcc cattatgtgc cagccattat aataggcact ggtgatccca |
| 35701 | cagtgaatca ggcacacaat gctgtcttca cggagcttgt tgtctagtgg gagagtcaaa |
| 35761 | caaaagtgta tatcaataat taagtgatta cagattgcaa taattacaat aagggtgata |
| 35821 | aacaggttgc tataatatac aatagtattg cctttcacca gacatttctt aaagaggtaa |
| 35881 | atcatctatc agacaccttt taaaaatctc atctaatttc aaaagtgtac ataaataatt |
| 35941 | aagtgattac agtttgcaat aattacaatg agggtgataa acaagttgct atgaaagaga |
| 36001 | aagatagcag agatctggct ttgagatggt ggtcagggaa gactgctcca atagctgagt |
| 36061 | tctaaagcta agaaggaact gagaaccttc acagaacgtc ccaagtagaa gagaaagcac |
| 36121 | actgaagact ctagggaaag aggtctgctt gttgtaggaa ccgaaagaag gccaatgtgg |
| 36181 | ctaggtgctg ggtagtgagg ggaaatggca caaggaaaaa atgaggttag agagatcagt |
| 36241 | tgataccagt taatgttgga ccctaaacat taaccatggt aagtctttta gaattgattc |
| 36301 | taattgcaat gaaaaccttt tgaaagattt taaaaagata tctgatagct gatttacctc |
| 36361 | tctaagaaat gtctggtgaa agacaatacc atcacattgg agatggaaaa agatgaatgg |
| 36421 | attctaaaaa cattctgaaa gtacattcaa aatgtttttc aggtagctta tgcaactaat |
| 36481 | aaatagtggt ggcattctgg gtaagacaag ggaggagcag gcttgcagtt tagggcaaga |
| 36541 | aaggggtggg gagaagagct cagcactaaa atcatgtgtt ccatttgggg cacatcgagt |
| 36601 | ctgagttgct atgagaccac caagtggaga tgccaagtaa atagtcagtt acatgaatct |
| 36661 | ggagttcagt gaagaggtct agaagaaaga tgtatatttg ggcattattc ggatatagat |
| 36721 | attatgtaaa gcaataaaat tggatgagat cacctaggga gagaatgcac atagataaaa |
| 36781 | actgacctag gaccacttca tgtctaaaac accaaaagca atgtcaacaa aagccaaaat |
| 36841 | tgacaaatgg gatctaatta aactaaagag cttctgcaca gcaaaagaat cagagtgaac |
| 36901 | aggcaaccca caaaatggaa gaaaattttc acaacctact catctgacaa agggctaata |
| 36961 | tccagaatct acagtgaact caaacaaatt tacaagaaaa aaacaaacaa ccccatcaaa |
| 37021 | aagtgggtga aggacatgaa cagacacttc tcaaaagaag acatttatgc agccaaaaaa |
| 37081 | cacatgaaaa aatgctcacc atcactggcc atcagagaaa tgcaaatcaa aaccacaatg |
| 37141 | agataccatc tcacaccagt tcaaatggca atcattaaaa agtcaggaaa caacaggtgc |
| 37201 | tggagaggat ctggagaaat aggaacactt ttacactgtt ggtgggacta taaactagtt |
| 37261 | caaccattgg ggaagtcatt gtggcgattc ctcagggatc tagaactaga aataccattt |
| 37321 | gacccagcca tcccattact gggtatatac ccaaaggact ataaatcatg ctgctataaa |
| 37381 | gacacatgca catgtatgtt tattgcggca ctattcacaa tagcaaagac ttggaaccaa |
| 37441 | cctaaatgtc caacaatgat agactggatt aagaaaatgt ggcacatata caccatggaa |
| 37501 | tactatgcag ccataaaaaa tgatgagttc atgtcctttg tagggacatg gatgaagctg |
| 37561 | gaaaccatca tcctcagcaa actatcgcaa ggacaaaaaa ccaaacaccg catgttctca |
| 37621 | cccataggtg ggaattgaac gatgagaaca catggacacg ggaaggggaa catcacacac |
| 37681 | tggggactgt tgtggggtgg gaagaggggg gagggatagc attaggagat atacctaatg |
| 37741 | ctaaatgacg agttattggg tgcagcacac cagcatggca catgtataca tatgtaccta |
| 37801 | acctgcacat tgagcacacg taccctaaaa cttaaagtat aataataata aaataaaata |
| 37861 | aaataaaaaa acaaaaattg atgtaggacc aattcctgaa gaacactgac agttaatttt |
| 37921 | ttggtttagg aggaggagaa gccagcaaac gacactgagt agcaatatcc aaagaaaaag |
| 37981 | aggaaaaagg aaaactggga gattatgagt gtcccagagg gaatgtttca agattaccat |
| 38041 | cagcagtgag ctttgtgtaa aggtggcctc ctgtaataga ggtgcgggca ggagaaggca |
| 38101 | gaatagggaa aagggggtga aaaagcttcc ctcaagattt ataatacagt ggaagagaga |
| 38161 | gacagagaga gagaaagaga aagagagaga gagaacttaa ggaggtagag gaagagagag |
| 38221 | aaccaaaaaa gagggagctg agtatagaag caattagatt catagttttt agttgcggca |
| 38281 | gtgatatttg agtgggggcc ttttatatat tccattctag gtgtttccca gttgatggga |
| 38341 | gagggtctta cctagatctg catgtaaaag ggagtaggcc agctggcaga cttgacatgg |
| 38401 | atcagtggta gaacatccta gcagttctgt gaatactctc tgagaatgac atgaaaggta |
| 38461 | ttggttcagg ccttttggag gtgataaaaa ccaccaaaat gtggacttat tgcaaattgt |
| 38521 | atttgttacc atttgcaatg attataatta ttctcttata tataggcttt cttacatata |
| 38581 | gcttctctta cacatagcgt catgagttat gccttctctt acatatagtg tctgctatga |
| 38641 | gttatgccaa gcagggcaaa caaaattgct gcctttcttt aaaaagagga cgctcctagt |
| 38701 | atgggcctaa ttaattatga taattacagc tatggcatgg aacataagca cattcatata |
| 38761 | cacaaagaca ataaaataaa gaacagttca aaaacagaac agttacatta tatatcagtt |
| 38821 | tcagtatgaa taataccctg gactctgaaa tatgtctggg gcacattatt ctgtaattgg |
| 38881 | tggtgaaaaa aaatctgcat cttatctcta cgccaatcct tatgaaggag ctgtttttca |
| 38941 | ggagttcgag aaagagacac agggatgtcc agtcatcaaa gccgcagagc ctgaggaaga |
| 39001 | ataaaggatt tgtggcagga aaacccagta atgaatgtat tctgctagtt tctcagcata |
| 39061 | gaacttagaa aagaggccac agaaggaaaa gagaagtaat gttagacagc tgatgttggc |
| 39121 | aatgggcaaa gaatttcatt ctcatatgca gggcagtggc taaaggggca gtgttgtgag |
| 39181 | gaatcacatt ccaggtcatt catgtccagg gtgtggtagg aggactgtgt ttcatttatt |
| 39241 | ttgtacatgg cccagctatg accttgtgca aggaaatgct taatcatttt ctatcacagt |
| 39301 | tgcaaagaga ttcttatcct actcagaatg tacgtcttct cttctgtttc atttacagtc |
| 39361 | acaacccaag tccttgcttt gacctccaaa gcaccacttg atgtatccac ttcagaaaca |
| 39421 | cacacagaca gctcacctct ttctatccct taccttcctc ccctcttcac tcaaaccacc |
| 39481 | tacttccttt gcattcactc ttccttcagc ctgaaataat cttcctccaa atatctacct |
| 39541 | tctcactccc tcacttctct caagatacac ttaaatgtta tattccctat gaggcctccc |
| 39601 | ctggccatcc ctccccagcc ttcctatccc ccctctctgc tttattttat tctccttaat |
| 39661 | atatatcaca ctctgataaa ccattgaatg tacttatcaa gttattgcct ctctctccct |
| 39721 | ttccattgtc tccatcactg agagctctgt gaagaaaagg atttgtacct gtttcattta |
| 39781 | gtgctgtacc cccagttccc acaacagcgc aacaggcact caataaatag ttgttgaata |
| 39841 | agtgaataaa acagaagtag ctgcatattt tctggtaaca aatgatattc ttctgaaaat |
| 39901 | gtcatatttt cagacatatt tccgaaaata aattcaaatt agataaacat tgtattttta |
| 39961 | gaccatttct tctttgcatt aatcatcctt ctcaataata taacatttgt aaaacttagg |
| 40021 | ttagatatgg gctcttcaac tttccattac agaagataaa gtgaaaaggc tagacccaat |
| 40081 | ggtgttattc cttcatctac atctatcctt tggaaacaca tgaccaaatt gcttgccatc |
| 40141 | acaatctcaa aatctaccct ttggtattaa ctcacttcac ttgtccctct gtcccttttt |
| 40201 | agatggtagc catcggtctc tggagcagtg tagagtcaga acaacttcta tttggggaag |
| 40261 | aaatcattgc tggtgacctt actttcaatt actaactttc tagtgacatt tacataattt |
| 40321 | tagagaaaat taacacctac acttgtaaag ttgtggcttt cccacaccta tttatcatct |
| 40381 | ctcaatattc cttgaaaagg aaattatcaa tttatcattc tatattggca atgaaatgcc |
| 40441 | cctaatatct gtcacctata agacaattga agatgatgtg ttgaaagctt tctgaaaatg |
| 40501 | ctgatcatta ctttaaatgg aattgaaatt ccagtttatt atttccaaaa atatgatctt |
| 40561 | actgatcata ggataacatt tcataacatt tcagagattt cttccccttc gaggagccaa |
| 40621 | acccatagga cctctggact cccacagatc ctggcaggga gttcccactc ataaaagcac |
| 40681 | aggtgccctc agagtcattc agggatgaag aagcaaccct cattggccat gtcctacgtt |
| 40741 | ccccatatag taaggactgg aggagaccag tgctcaattc tgcagtctca gacagctgtc |
| 40801 | agaggagagt catgaatgtg cagtgtctag cacattacaa acgtttgtta attgactgat |
| 40861 | cattcatggt gtgacagccc tataactcag ctatcctatt cagtcagaaa ttaactcagt |
| 40921 | aatcaaagtc attaaaagga agaaaaaaaa aacctacagt accagacaga tggtggggaa |
| 40981 | atcagacaga tgaaaggaaa aatggctgta ggtcattgag taagacactg ggcagcaaaa |
| 41041 | cctgggcctt gtgcctggtt atactccaca ttatagctcc agcaaggttt ggcaggattt |
| 41101 | ccacagtcct ggcttattct aacctttctt gggagcagga gcagtgttgg tcagatagac |
| 41161 | agacacataa ggaatctgtc caactggcac cgtgtgaatt tgggctcttg gtgtacatgg |
| 41221 | ataactggga aaaagaggag agagacatgt aggactgatc ctaccgtttg tgaagtcttg |
| 41281 | ggcaagagta tgaatgaaaa cccacttctc ttcccctgcc tggctccact gcacacagta |
| 41341 | aagagcctca agcataggtg tgtggacatt gcaccatgta tccaagctct gaccatgcct |
| 41401 | cttgaaacag ctattcctca gccaccctct gaccatggga ggaatgaccc aggagaaatg |
| 41461 | accacatagg tcttgaaaat gggctcaggg ctatttacga agtcaattcc ggggtcccag |
| 41521 | gagtatggac taaaatgtga gtcaggcatg ccagatgggt atgttctatt gacttcaagg |
| 41581 | attcctcatg ctgtgggaag gaacctctcc agaagagaga cagagcagaa ccctctaaat |
| 41641 | gtggggcaca aagcaggagc ccctcttgct ggattcaaag ggtcatactg gaagagtgta |
| 41701 | ggttgagtct tattctcaca tcactcatat cacttacaca cttcttttat agccttagca |
| 41761 | gccatgccac aaagagaaac tcttcatgca tatcttttgg tccataagtc ataaatagtt |
| 41821 | atccttgatc ccatgtcttt tttagagcca tggacagaga gaagcaaaaa tataccaagt |
| 41881 | tcacactgag ttgtctccct tcatatctct tagcagtcac tgaaaggtta tgagactcag |
| 41941 | gcbgggtttc tatcctctgt ccctgaaacg acaacgttga cctcgtgatc aaccctagaa |
| 42001 | tccagagcaa gatctcagac tgtcctctct actaccagac agcacacttt gttttggggg |
| 42061 | ctgtgtgctt gaaatattag ctatggcaaa aggctttgag tcttatgaca ccccaagtaa |
| 42121 | cttttacttt aggaatttga aatacagcct tgctgtaatg ctgtctcctt aacaaagcag |
| 42181 | tacctttgaa atatttaaca acttgaaaag gaaaccgagc ttgaattttc ctttcaggtg |
| 42241 | ctcaggaaat aatgtttcac ttctgtctga aattcaccat ctcctcagac aaagaaggct |
| 42301 | cttatggtaa aaggaatggc attttctcca caattttcga ataaaagata aagagaaaac |
| 42361 | agcactgcag cctttttgtt aggatctaac aataaagaaa taatacggtt ttgccagggg |
| 42421 | agagctctgg ttttaagctc agaatacaaa aataggctga caaaatttta caaaggaata |
| 42481 | ttctcagcta ccactctgag gatggtagaa agtgaaattt caagaaaatt atattatttg |
| 42541 | attatttgat gatgattaag ctgattggcc agtcctatgt gaaattctaa agtagaagaa |
| 42601 | atgtgatgtt gtcttttctg ctcacctctc ccctcattcc tacccccaaa tctctgcctc |
| 42661 | taccccaaac ccagcctgac ctttgggaaa ggaatggggg ctgtcacttg caccgtagct |
| 42721 | cctcctgcct gcagtactct ccccccacag tccagcctcc ctctgctcag ctaacttttc |
| 42781 | ctatagctcc ttctggctac ttctaaggaa ccttccataa tgctgcccac cctctcagta |
| 42841 | acagcccctc tactatccct tgattacatg cactgtaatt ggttagtaat tgattttatg |
| 42901 | tcctctgcca aattatactc catgagagca aaaatcatga gtattatctt taatgtttaa |
| 42961 | atctccacaa ctatccccca tataagtcta gagaataaat gaatgagtga attaatgaat |
| 43021 | agaaactcaa gccattatgt tgccactcct aggatatttg gattaacttt aactgaagag |
| 43081 | taaaaagcat ttacctgtcc taaaggagac ataaaattag tgggagagta tttggagaaa |
| 43141 | aaaaagacac tgtaatacat tcttttgtgt tgcctaccct gatgtagtca ggtgtccctg |
| 43201 | atatggggtg ggctgaggat ttgaaataaa atacctaatt tgacattgta agtggaggaa |
| 43261 | tcaggatttg aaaccaaatt ggtttgacct aaatcaagct attatgataa ggacttgcaa |
| 43321 | gaaaaaagga atccataaaa accatatgaa tagctaccaa ttagtaagca tttatatgtg |
| 43381 | tcaattacaa agccaaatgc aaatcatgct ttatttatat tagccacctt ttatagatga |
| 43441 | agaaattgag acctgaatat taaaattgcc tacttttaca tagtaagtaa aggaatcagg |
| 43501 | gtttgaaccc aaattggttt cacctaaggt agaaaaccat cccagcaagt ctcctattaa |
| 43561 | ctggaaccct attgtggtgg cctgagatat aacagtagct gtggaagcgc tgtagagtcc |
| 43621 | tggccatcct atgtgctcct gatctggtcc ctcctgccac ctgcttctgc tccctgtgcc |
| 43681 | atccacccat ctggaagtct cccagtgtcc atcttcgggg gagacactca ccagagtttc |
| 43741 | cagcttccag ccagtatgga gtgcccctgt cccacagcaa tctcaccgaa atcacagcta |
| 43801 | catctgttaa aattaggcta ccaatgagtg atagatgagg gggaaaaata ataatagtgt |
| 43861 | actaaacaaa acaaatgttt atttttctca cacataaaaa tctagaggtt gaagtccagg |
| 43921 | gctggtccag aggctccaag gatctgggat ttagactccc tctttcttgt ttttccacag |
| 43981 | catatggctt ccatttctgg ggccacattg gtccaaaatg tatgcbgggg ctccagccat |
| 44041 | tgcatccata tttcagccac aggaaggagg aagtggggaa gaaaggacag gcccctaata |
| 44101 | cctgtatagt tcaagaagac tatcccgccc atacttccca accaccctta gttgaacaat |
| 44161 | gcbgtcttaa ttcaagacac tcacatgtct agccaaaaat ctgaattctg ttacaaacaa |
| 44221 | ggagaataga gatgtgcgcc acctcaatac ctcatccata gctacctttt cctttgtgca |
| 44281 | gctgtggcca agtgaaagct gaaggagctg tggtaaccct tctgaaggga ggctggggcc |
| 44341 | tttcacaaga ggctgcatga ttgacattta tcctgcatgg cctgtgaagt acagagaaat |
| 44401 | attttctctt gaagccacat catagcagtg gctgctttgt agcctgattc caccattatg |
| 44461 | cctttaaagt gcctagcaat tcagccttca catcatgcaa agaggaatat ctcccagtct |
| 44521 | ttgtaagatc agcttaattc taaccacctc cttacctccc actgcactcc tacacgcaca |
| 44581 | cacaaatctt cttcactcag agcagaacca taacccaagc cctaccacct agagactgaa |
| 44641 | gaatcaggct catgattaca aatatgcaat aattttttgt gtggataatg tcaatgggga |
| 44701 | tgatggtaag agaattcctt ggtttacaca ttgaccctct tccctgtccc ttacaatcag |
| 44761 | gaaatatttg tcccaacacc ttgtttcttc tgttgcaggc tcctgtggct gtcttgtcat |
| 44821 | gatattgttt gcctctgaag tgaaaatcca tcacctctca gaaaaaattg caaattataa |
| 44881 | agaagggact tatgtctaca aaacgcaaag tgaaaaatat accacctcat tctgggtcat |
| 44941 | tttcttttgc ttttttgttc attttctgaa tgggctccta atacgacttg ctggatttca |
| 45001 | gttccctttt gcaaaatcta aagacgcaga aacaactaat gtagctgcag atctaatgta |
| 45061 | ctgaaaggca aacctttcta taattttaca agggagtaga cttgctttgg tcacttttag |
| 45121 | atgtggttaa ttttgcatat ccttttagtc tgcatatatt aaagcatcag gacccttcgt |
| 45181 | gacaatgttt acaaattacg tactaaggat acaggctgga aagtaaggga agcagaagga |
| 45241 | aggctttgaa aagttgtttt atctggtggg aaattgcttg acccaggtag tcaaaggcag |
| 45301 | ttgactagaa tcgacaaatt gttactccat atatatatat gtgtgtgtgt gtgtgtgtgt |
| 45361 | gtgtgtgtaa gatgtcttcc tatcaaaaag atatcaaagg cacatggaat atattttaat |
| 45421 | aaaaacaaat aatatctcta atatatccac acatttgttg ccagatttca gaaaactgag |
| 45481 | ctgcaatcgc tttcctaaaa cagtagtgta ttaaatgaac atctataaaa tgtatcaaca |
| 45541 | cacattttaa aaaatttgtt taaagtatac tcttaggcca ggcgtggtga ctcacacctg |
| 45601 | taattccagc acttcaggag gccaaggtgg gaagatcatt tgagttcagg agttcgagtt |
| 45661 | acagcctggg caataaagtg agaccctgtc actaacaaaa ttaaaaaata aaataaatat |
| 45721 | aaaatatagg ctttaaaaaa gcatagtctt attaaccatg tctgttggtc aaaatctgca |
| 45781 | aactctaaaa gaagaaaaga agaaaaaacc aagcttaggg tatttttcct cccgtgcctg |
| 45841 | agtcccaatt acattcacga cagtactttc aatgaacata attgttagga ccactgagga |
| 45901 | atcatgaaaa atgatctctg cttagtacat ttgatgcaaa atgacttatt aggggctgtt |
| 45961 | tttctagcta tagtgtctcg agtactaata tgcaattatg aaaattatat taaatctggg |
| 46021 | attatgacgg tatcactgta tcatcttggt cttgttctgg ctgtcaccaa gcatgaccca |
| 46081 | ggtcaacttt ttttttcccc tgaattaccc atcaaattga tctgcagctg actaaaggcc |
| 46141 | acagctgagc ctggaactga cccttccttc atcctcaacc tgctgtcctc cagaaagcac |
| 46201 | caaggaaaaa gcagagaatg acagcaaaca gatcactagg cctctgacca caggtgctga |
| 46261 | gtactcagca gccctcatat aataggtttg aaagtactcc ttaaaataaa acactgtttc |
| 46321 | cctttggaac tatttacaag gatgaaacaa ccgtatacct gagaaataac ttgctctggt |
| 46381 | gtcaattcgc tattcgccag cagacatcag aacacaccga gtttccagat gctggttttt |
| 46441 | ccccttaaat caggaaatac acctggacaa tttctagaag actacaattc agtctagcca |
| 46501 | caaaggggat tttttttttt tggtaacagg ctagagcccg gttctgtaag tctttagctg |
| 46561 | aaatggtcca gtacaaaagc actggaaatg agtgggctag gaggacaagg accgtctcct |
| 46621 | gcgtgaggag ttggttggag gtccccaagg ccaggtaccc cctgcactct tattggattc |
| 46681 | ctctctgtct tcttggagtt ttgaaaaact ccttcgaaca ccaggctttt ttctttagaa |
| 46741 | aacaagtctc caatcgttct ctgttccgta gaaagagaaa gaaaacctgg agcagctgct |
| 46801 | gaaaaatcta atgaggaact aagaggcaaa cccacca |

[0166] A non-limiting example of a human wildtype CLRN1 genomic DNA sequence is SEQ ID NO: 47. The exons in SEQ ID NO: 47 are: nucleotide positions 1-544 (exon 1), nucleotide positions 28764-29180 (exon 2), nucleotide positions 31239-31418 (exon 3), nucleotide positions 32481-32519 (exon 4), nucleotide positions 44799-46433 (exon 5), nucleotide positions 44799-44935 (exon 6), and nucleotide positions 46128-46837 (exon 7). The introns are located between each pair of these exons in SEQ ID NO: 47, i.e., at nucleotide positions 545-28763 (intron 1), nucleotide positions 29181-31238 (intron 2), nucleotide positions 31419-32480 (intron 3), nucleotide positions 32520-44798 (intron 4), and nucleotide positions 44936-46127 (intron 7).

### Transmembrane Channel-Like 1 (TMC1)

[0167] The TMC1 gene encodes “transmembrane channel-like 1” (TMC1). TMC1 is a calcium-dependent chloride channel and interacts with transmembrane O-methyltransferase homolog in the stereocilia of hair cells. Mutations in TMC1 may lead to non-syndromic sensorineural hearing loss. For example, a D572N mutation in TMC1 has been associated with deafness (Kurima et al., Nat Genet 30:277-284, 2002, and Wei et al., J Transl Med 12:311, 2014).

[0168] The human TMC1 gene is located on chromosome 9q21. It contains 24 exons encompassing ˜314 kilobases (kb) (NCBI Accession No. NG008213.1). The full-length wildtype TMC1 protein expressed from the human TMC1 gene is 760 amino acids in length.

[0169] An exemplary human wildtype TMC1 protein is or includes the sequence of SEQ ID NO: 48. Non-limiting examples of nucleic acid encoding a wildtype TMC1 protein are or include SEQ ID NO: 49.

[0170] In some embodiments of any of the compositions described herein, the TMC1 protein comprises a sequence that is at least 75% (e.g., at least 80%, at least 85%, at least 90%, at least 91%, at least 92%, at least 93%, at least 94%, at least 95%, at least 96%, at least 97%, at least 98%, at least 99%) identical to SEQ ID NO: 48.

Human TMC1 Protein (NCBI Accession No. NP_619636.2)
(SEQ ID NO: 48)
MSPKKVQIKVEEKEDETEESSSEEEEEVEDKLPRRESLRPKRKRTRDVINEDDPEPEPEDEETRKAREKER
RRRLKRGAEEEEIDEEELERLKAELDEKRQIIATVKCKPWKMEKKIEVLKEAKKFVSENEGALGKGKGKRW
FAFKMMMAKKWAKFLRDFENFKAACVPWENKIKAIESQFGSSVASYFLFLRWMYGVNMVLFILTFSLIMLP
EYLWGLPYGSLPRKTVPRAEEASAANFGVLYDFNGLAQYSVLFYGYYDNKRTIGWMNFRLPLSYFLVGIMC
IGYSFLVVLKAMTKNIGDDGGGDDNTFNFSWKVFTSWDYLIGNPETADNKFNSITMNFKEAITEEKAAQVE
ENVHLIRFLRFLANFFVFLTLGGSGYLIFWAVKRSQEFAQQDPDTLGWWEKNEMNMVMSLLGMFCPTLFDL
FAELEDYHPLIALKWLLGRIFALLLGNLYVFILALMDEINNKIEEEKLVKANITLWEANMIKAYNASFSEN
STGPPFFVHPADVPRGPCWETMVGQEFVRLTVSDVLTTYVTILIGDFLRACFVRFCNYCWCWDLEYGYPSY
TEFDISGNVLALIFNQGMIWMGSFFAPSLPGINILRLHTSMYFQCWAVMCCNVPEARVFKASRSNNFYLGM
LLLILFLSTMPVLYMIVSLPPSFDCGPFSGKNRMFEVIGETLEHDFPSWMAKILRQLSNPGLVIAVILVMV
LAIYYLNATAKGQKAANLDLKKKMKMQALENKMRNKKMAAARAAAAAGRQ
Human TMC1 cDNA
(SEQ ID NO: 49)
atgtcacccaaaaaagtacaaatcaaagtggaggaaaaagaagacgagactgaggaaagctcaagtgaaga
ggaagaggaggtggaagataagctacctcgaagagagagcttgagaccaaagaggaaacggaccagagatg
ttatcaatgaggatgacccagaacctgaaccagaggatgaagaaacaaggaaggcaagagaaaaagagagg
aggaggaggctaaagagaggagcagaagaagaagaaattgatgaagaggaattggaaagattgaaggcaga
gttagatgagaaaagacaaataattgctactgtcaaatgcaaaccatggaagatggagaagaaaattgaag
ttctcaaggaggcaaaaaaatttgtgagtgaaaatgaaggggctcttgggaaaggaaaaggaaaacggtgg
tttgcatttaagatgatgatggccaagaaatgggcaaaattcctccgtgattttgagaacttcaaagctgc
gtgtgtcccatgggaaaataaaatcaaggctattgaaagtcagtttggctcctcagtggcctcatacttcc
tcttcttgagatggatgtatggagtcaatatggttctctttatcctgacatttagcctcatcatgttgcca
gagtacctctggggtttgccatatggcagtttacctaggaaaaccgttcccagagccgaagaggcatcggc
agcaaactttggtgtgttgtacgacttcaatggtttggcacaatattccgttctcttttatggctattatg
acaataaacgaacaattggatggatgaatttcaggttgccgctctcctattttctagtggggattatgtgc
attggatacagctttctggttgtcctcaaagcaatgaccaaaaacattggtgatgatggaggtggagatga
caacactttcaatttcagctggaaggtctttaccagctgggactacctgatcggcaatcctgaaacagcag
acaacaaatttaattctatcacaatgaactttaaggaagctatcacagaagaaaaagcagcccaagtagaa
gaaaacgtccacttgatcagattcctgaggtttctggctaacttcttcgtgtttctaacacttggagggag
tggatacctcatcttttgggctgtgaagcgatcccaggaatttgcacagcaagatcctgacacccttgggt
ggtgggaaaaaaatgaaatgaacatggttatgtccctcctagggatgttctgtccaacattgtttgactta
tttgctgaattagaagactaccatcctctcatcgctttgaaatggctactgggacgcatttttgctcttct
tttaggcaatttatacgtatttattcttgcattaatggatgagattaacaacaagattgaagaggagaagc
tagtaaaggccaatattaccctttgggaagccaatatgatcaaggcctacaatgcatcattctctgaaaat
agcactggaccacccttttttgttcaccctgcagatgtacctcgaggaccttgctgggaaacaatggtggg
acaggagtttgtgaggctgacagtctctgatgttctgaccacctacgtcacaatcctcattggggactttc
taagggcatgttttgtgaggttttgcaattattgctggtgctgggacttggagtatggatatccttcatac
accgaattcgacatcagtggcaacgtcctcgctctgatcttcaaccaaggcatgatctggatgggctcctt
ctttgctcccagcctcccaggcatcaatatccttcgactccatacatccatgtacttccagtgctgggccg
ttatgtgctgcaatgttcctgaggccagggtcttcaaagcttccagatcaaataacttctacctgggcatg
ctactgctcatcctcttcctgtccacaatgcctgtcttgtacatgatcgtgtccctcccaccatcttttga
ttgtggtccattcagtggcaaaaatagaatgtttgaagtcattggagagaccctggagcacgatttcccaa
gctggatggcgaagatcttgagacagctttcaaaccctgggctggtcattgctgtcattttggtgatggtt
ttggccatctattatctcaatgctactgccaagggccagaaggcagcgaatctggatctcaaaaagaagat
gaaaatgcaagctttggagaacaaaatgcgaaacaagaaaatggcagctgcacgagcagctgcagctgctg
gtcgccagtaa

[0171] A non-limiting example of a human wildtype TMC1 genomic DNA sequence is SEQ ID NO: 50. The exons in SEQ ID NO: 50 are: nucleotide positions 1-113 (exon 1); nucleotide positions 56102-56223 (exon 2), nucleotide positions 94568-94677 (exon 3), nucleotide positions 106121-106263 (exon 4), nucleotide positions 126797-126864 (exon 5), nucleotide positions 166909-166956 (exon 6), nucleotide positions 172743-172914 (exon 7), nucleotide positions 178718-178843 (exon 8), nucleotide positions 218319-218409 (exon 9), nucleotide positions 220644-220725 (exon 10), nucleotide positions 230050-230156 (exon 11), nucleotide positions 232986-233084 (exon 12), nucleotide positions 250613-250755 (exon 13), nucleotide positions 266539-266683 (exon 14), nucleotide positions 267323-267517 (exon 15), nucleotide positions 270086-270265 (exon 16), nucleotide positions 270391-270552 (exon 17), nucleotide positions 283582-283710 (exon 18), nucleotide positions 294343-294410 (exon 19), nucleotide positions 299042-299281 (exon 20), nucleotide positions 305069-305194 (exon 21), nucleotide positions 308651-308729 (exon 22), nucleotide positions 308831-30882 (exon 23), and nucleotide positions 314151-314551 (exon 24). The introns in SEQ ID NO: 50 are: nucleotide positions 114-56101 (intron 1); nucleotide positions 56224-94567 (intron 2), nucleotide positions 94678-106120 (intron 3), nucleotide positions 106264-126796 (intron 4), nucleotide positions 126865-166908 (intron 5), nucleotide positions 166957-172742 (intron 6), nucleotide positions 172915-178717 (intron 7), nucleotide positions 178844-218318 (intron 8), nucleotide positions 218410-220643 (intron 9), nucleotide positions 220726-230049 (intron 10), nucleotide positions 230157-232985 (intron 11), nucleotide positions 233085-250612 (intron 12), nucleotide positions 250756-266538 (intron 13), nucleotide positions 266684-267322 (intron 14), nucleotide positions 267518-270085 (intron 15), nucleotide positions 270266-270390 (intron 16), nucleotide positions 270553-283581 (intron 17), nucleotide positions 283711-294342 (intron 18), nucleotide positions 294411-299041 (intron 19), nucleotide positions 299282-305068 (intron 20), nucleotide positions 305195-308650 (intron 21), nucleotide positions 308730-308830 (intron 22), and nucleotide positions 30883-314150 (intron 23).

| Human TMC1 Gene Sequence (NCBI Reference Sequence: NG_008213.1) | |
|---|---|
| (SEQ ID NO: 50) | |
| 1 | cagaaactat gagggcagaa cccagcaatc tgtgctttct ttcacaagcc ctccaggagt |
| 61 | tgctgaaatt taggaatcat tgccccaaaa agtggccctc ataatgatgc caggtaagga |
| 121 | aagacaacat tattacctat gtgtggtgtg ttaacattct ttatgaaaca tgtgtgaaga |
| 181 | cctaaatcga agactttctc catgagatat tccctaatca cattagtgaa ataaaactat |
| 241 | atttcctcta cttttctact gctacagaaa tctcccccag ttaggatagt cccagtttcc |
| 301 | tatttatctt tgtttttctt gcagtgcaca gcatgtcacc cagtaattga taagtttttt |
| 361 | tttttttgag acggagtctt gctctgtctc ccaggctgga gtgcagtggc gcgatctcgg |
| 421 | ctccccaagt agcbgggact acaggcgccc gccatcacgc ccggctaatt ttttgtattt |
| 481 | ttagtagaga cggggtttcg ccgtgttagc caggatggtc tcgatttcct gacctcgtga |
| 541 | tccgcccgcc tcagcctccc aaagtgctgg gattacaggc gtgagccacc gcacctggcc |
| 601 | taattgatat gtttaaatgt taaaattaaa tgcaatgatt tcctaaaata aacaaatgtg |
| 661 | ggacaattta ttgcactctg ttcaaattcc cattttgaag tggaattcaa acaaacatga |
| 721 | cagtaaaggg ggacagtgag cacagggaca agagaaaagg agaaagggaa gaaatacaga |
| 781 | gaactagata ggaggaagtg tcaaagactg atgggtgtaa gccaccttta cctctggata |
| 841 | ttggttttcc tttgaattgt ggtatgtggt catattgctt attagttata acatacagct |
| 901 | gtcagaagag tttttcaatt aaaatttcaa atgtaatatt aaaactgttt ggattccttc |
| 961 | ctactgggca ctggacactg tctgtggagc tgctggaaca gcgctgaata gggtcatatt |
| 1021 | ttaaaggaac tcagcctagt gcagtttctc aaccttagca ctattggcct ttggggcctg |
| 1081 | ataatccttt tttgtgaggg gctgtcctgt gcactgtagg atgtttagca gcatccttgg |
| 1141 | cttctactca gtagatgaca gtatcaaccc ccttccccag aagtgacaat taaaaatgtc |
| 1201 | tccagacttt tccaaatgtc ccctgaggag caaaattgtc tccagttgaa aaccactggg |
| 1261 | ttagtgggag aaacagataa gacagaagtt ctccatacac catgataatg ccatgatgcc |
| 1321 | atagggctgg caggagtgaa gggaagagca tctcacaaag actcgggggg atgcagggag |
| 1381 | gaggaaaaat taggaaatga agtgggctga gttgcagtta gcctgtgggg aaaatgaagg |
| 1441 | agaagggata aggaagaaga ggaggaagga gggaggaaga gtgaggagta atagggaatt |
| 1501 | atagttgacc ttgaacaact tggggtttag ggatgccgac ccttgcgtag tcaaaaatct |
| 1561 | gagcttaact tttgactacc ctcacacttt cctaacagcc tactgttgac cagatgcttt |
| 1621 | accaataaca taaacagttt attaacacat attttgtatg ttttatgtat tatacactgt |
| 1681 | attcttacaa taaggtaagc tagagaaaag aaaatgctat taagaaaatt gtaaggaaga |
| 1741 | aaaaatatat ttactgttca ttaaggggaa gtagatcatc ataaagctct tcatccttgt |
| 1801 | catcttcaag ttgaataggc tgaaggagga gggggagaga gaagagactg gccttgctgt |
| 1861 | cttaggggtg gcagggatgg tagaggtgca ggaggtggaa ggggaggcag gaaaggcagg |
| 1921 | cacactcggg gtagctttcg ttgaaagaaa tcttcatatg agtggaccca tgcagttcaa |
| 1981 | acctgacttg ttcagagtca actgtacttg ttccaggcta agaacagaga ataaaaaaaa |
| 2041 | aatgtataga ggcctgaaac agcatattat attaaaagaa ctcaaagccg gtaaatgctt |
| 2101 | tgctactgaa gcataaagtg agaaaggggc atcatgggct ctgaaattgc agccacaagt |
| 2161 | ctacagaaca catttttcat agcccaaggt cagtcttcta ttaccctttg cagtgaggtt |
| 2221 | atcatcatcc attttcactc gtcagtgctg gggagcccat taaatacttg ccactatact |
| 2281 | tggtcccaac agttaataga ctgtagcatc ttttatttct tcacctagcc tgaaatcagt |
| 2341 | tgagcttttg cagaatctta gatatgtcgt ttttttcttc aggtttagaa tggggcactt |
| 2401 | aaaaagatgc atagtacttg aaaatagaga aagaaaatag catgtagaaa tttgtgcctt |
| 2461 | tattctgccc aaacgtctca aaaaggaaaa aaataatttt aagggtaaat attgtcatca |
| 2521 | atttatctga gctcttttga cttcctttga gcctgaaaaa caggatcagt gtctttttag |
| 2581 | tatttaccat agtgcctgat atgtagaagg tgtttgacca atgtttatta gataaatgtt |
| 2641 | cacttttatt actagtaata ttaaccacat tttaatagag actaataata catgataaac |
| 2701 | ttctcaagga tgcgatctca tttgatcact ataacaaccc aatgaggtaa gcgaggaata |
| 2761 | gttgttaact ctaatacatg ttatatctta tccttgaccc agtattaccc cagtcatgcc |
| 2821 | ttcctttccc tgcaatgaaa gaaaaccgat aaacacaaaa tgttgtatcc catataagca |
| 2881 | ttcattctta tggtagataa gtaaatggaa aagataggta tgcattctca atttttttaa |
| 2941 | gtcctagaat tataaaacag taaagaagtg agaagagaga gaaatcttaa gggaccaacc |
| 3001 | tcttgatttt acaggtgaga aaactgaggc cacatagcca tttagtgcag agccaggatt |
| 3061 | ataaaccaga tgtttggaat cctatgtggt ggtggacacg aggatatact aattagcgtc |
| 3121 | gttaccggaa aattccacat atctctaagg agcagatcac cacacacctg cacagcccaa |
| 3181 | gcctggattg tggaggtttt tcttgtagag tttgtctttg atagaaagat acggtccaga |
| 3241 | aggccggctt caaggacata agaaagggca tattcaaaac aaatacatgt atgcctattc |
| 3301 | ttttaaaccg gtacttaaca atagtatcca ggtgtccaaa tataatagct tatctgtttt |
| 3361 | attttttcca gaaaaggaaa caaggtctta gagaggttac attttgcata ggattttgtt |
| 3421 | agccaagtca gcatctgttt gcatcttaaa aatgagtcat acctattcct tgtaagtagg |
| 3481 | acaggagggc agctggaatt tcccagctca ctccttgtca ctgcttcctg cctctgctgc |
| 3541 | tctttgtcct ccacagcacg cttcattggc taaaaagtga accagatact acattacctc |
| 3601 | agggcagttg taagtactga gtcagatgcc ttaggcttgt gtgatgggaa gtttagggcg |
| 3661 | agaccaatgt cttgctttaa caacagtgtg aataagttaa tttcttttga gattttatta |
| 3721 | ctcaatattc cacccagaaa gaaacacaga tgacactcag ccaatcaaag gccatctggg |
| 3781 | actgacaaac gcagagcttg ttgtagatga caaggctcag tggatggatc atcactgaaa |
| 3841 | gaaagggaaa cagtttgaac tgttgtatct ctctccttgc tcacatgaaa aacaaaaaaa |
| 3901 | tccttggcca gttgcggtgg ctcacgcctg taatcccagc actttgggag gcccaggcgg |
| 3961 | gcagatcact tgaggtcaga agttctggac cagcctggcc aacatggcaa aaccccgtct |
| 4021 | ctactaaaaa tacaaaaatt agccgggcgt ggtggcacac acctgtattc ccagctactt |
| 4081 | gggaggctga ggcatgagaa ttgcttgaac ctgggaggtg gaggttgcag tgagccaagg |
| 4141 | tcgtgccact gcactccagc ctggatgaca gagtgagact ccgtctcaaa aaaaaaaaaa |
| 4201 | aattccttaa ccacagacta agtaagcatt attgcacaga gtgtcattcg ctaatcttgc |
| 4261 | ttgtgcctga actttgaaag caccagcccc ttgctttggg ggcbgggggc gtggggtgta |
| 4321 | agtgtgtgtg tcctctagaa gaagacaaca ctgagaacag aaggagagga tcttggagat |
| 4381 | ttgttaattt cctattgcag ttagccttgt ctggggctct cactttagca cttaaaataa |
| 4441 | catactcctt tgcacagatg ttattttttt ctcttcatgt gtacaacttg aattatccaa |
| 4501 | tggccttgct ttgaggatat tcatcctatc ttattgatcc tgtcactgtg taggacaatg |
| 4561 | gagaacacag taaaaaaccc tcaatggata ctacttacac taaattaact ctatgaattc |
| 4621 | aaaatttgaa gatgctactt aatcatgtaa gcctggttct ccaaaacttc atctgccatg |
| 4681 | ggaaaaatca aagcttgtaa aatgattaaa cttgtaaagg aattaaactc taggattcac |
| 4741 | tcattttata attggtattt tcaccctaag agctttcttt ttcctctctg gtgtttaaaa |
| 4801 | acaaagtaaa accagacaaa acaagattaa ctaaattaaa acccctgtga ctttaaaaaa |
| 4861 | tgtagccaag aataatgtgc aagtgtctag ttaggccaat agatatcctt aacatacgtg |
| 4921 | agcbgggaac acaaatgagc atgaagggca aggaagagca ccaccccctg cttcttttcc |
| 4981 | tgctcctgtt cttgcagagg gtcaggcttg gagaccacat atggtcagct caacactcaa |
| 5041 | gtccaccaag cagcccatga ggaactcttc cttccagagt tgtgcacacc atgcagtgtg |
| 5101 | gtccacctgc agaagcacac aacaggcgct gcctgggcca gaggtccatt caggccatgg |
| 5161 | aattggtctc aatgccattt aggcatgaat ccagggtcct gggtaccaga cgcatggtct |
| 5221 | aggtaggggg tgtcatgtac taggtgagca tggggttccg ctgggcatgt tcccttgtct |
| 5281 | tgtaggatgt tagctctgag gggcgtggct ggaagaaggc tagccttgag ccctctaaaa |
| 5341 | ggcagggctc agggcaaagc tcccagttgc tcaggcctgt gggtaatact gcttaaaaat |
| 5401 | ccccttgaga acttctttaa aatgcaaata tctcgattct tttgtagttc aaaagcatga |
| 5461 | tgattgggtg ttcacaggca tgtgtaagac gtgacaccct ctgaacctcc ttatgacccg |
| 5521 | gtacattacc tgtctgacct gaaaaaaaaa tgcaaatttc tggattctac ccgcctcccc |
| 5581 | gcactccgac attacgatgt agcagctctg tggtaggatc caggaatctg cctgtgtaat |
| 5641 | cacaggttga tattctggtg tttcctggtt ttgctctgct gatttggggg atgtttacca |
| 5701 | gcaggagagc agcctctttc ctctgccctc ctcccttgct gccctcccca gaccccagtg |
| 5761 | actcacgctc ctcctgctcc tcctgttgct ggcctctctg ttgtggttgc cagcgctact |
| 5821 | ttgcagacgc tgcctgctcc ctgcacgcca acacagattc tgtttccctg cgaccgctgc |
| 5881 | tgctgttgtt tgttccgtcc ctggtttatt gtaggagagc tgattgttct gttgccactg |
| 5941 | ctaccaagct gcaaacacca ggctcacggt gcaaggggaa ggggcttctc ctctgggtgt |
| 6001 | tctgcctcta tcgcctaggc tctcaggctt tgttgccaat ggcactgcga gaccctaaac |
| 6061 | tatggccttg tgattcccac atctccattt agttctttct tttgttctct aagatctgag |
| 6121 | aaggagccca tgtctttcag tgttcctgtt ttcttgcgat acttcccccc tccccgactc |
| 6181 | cagaatttag ggcaaccttc tgcbgtggtc tgaatgttta tttctctcca ccccgccaaa |
| 6241 | cttatatgtt gaaatcttaa cccctaaggt ggtggtatta gaaactgaag cctctgggag |
| 6301 | gtaattaagt tataaggaca aagccctcat gaatgggatt actgttctta taaaaaaaag |
| 6361 | gccccagaga gctagctagc tccttccacc atgtgaggac acaacgtgaa ggtgctgtct |
| 6421 | atgaggaagg gtccctcacc agacaccaat catctggcac attgatcttg aacttcctat |
| 6481 | cctccagaac tgtaaacaaa taaatttctc ttgcttataa accataagtt catgattttt |
| 6541 | tttttttttt tgagacggag tttcgctctt gttgcccagg ctggagtgca atggtgtgat |
| 6601 | ctcggctcac aacaaactcc gcctcccggg ttcaagcgat tctcctgcct cagcttccca |
| 6661 | agtagcbggg attataggca tgcgccacca tgcctggcga attttgtatt tttggtagag |
| 6721 | acagggtttc tccatgttgg tcaggctggt ctcgaactcc tgacctcagg tgatccaccc |
| 6781 | gcctcggcct cccaaagtgc tagggttaca gatgtgagcc actgcacctg gccaagttca |
| 6841 | tgatttttgt aattagcatc caaaatggac taaaaccccc atcctcctga aggttctgaa |
| 6901 | tctgaggacc caagacttgg ctctcagcct taatgtcctg ctcccactat tttcaggggg |
| 6961 | cccaatataa atttcctgag tttttgaggt ggttgggctt gcagactgac ctttagtatg |
| 7021 | ccctttgtta catttacaaa atagattgct tacagggtta gacaaataca gttgaccctc |
| 7081 | tgtatccctg ccttccatat ccatgggtca aaattatttg gaaaaaaaaa tgtgtctgta |
| 7141 | ttgaacatgt atagattttt tttttgtata tttcctaaac tatatcgtat aataactact |
| 7201 | tacagagcat tcatattgta ttaggcatta taagtagtgt agttatgatt taaagtatgt |
| 7261 | gagagaatgt gcacaggtta tacagaaata ctacaccatt tttttttttt taatcaggga |
| 7321 | ctgaagcatc ttttcagcta tgactttggt atccggtggc gggtggggcg gtgggtgggt |
| 7381 | cctggaacca ttcctccatg aataccaagg gataactcta attgctaaat cgtttcctat |
| 7441 | ttttgtgaac tggtaaagga ctgcatgaga aaggccaaaa attaaagaat aatatgctta |
| 7501 | ttcaagcccg gtgtggtggc gggcacttgt agtcctagct acttggaagg ccgagatggg |
| 7561 | cccaggagtt tgaggctata gagggctatg gttgcacctg tgaatagtca ctgcacacta |
| 7621 | gctcgggcaa catagctaga ccctgtctct aaaaaagaaa aattctgctg taataaacct |
| 7681 | gcacgcataa aatgatgtct atgtgtctat atagtgtgta tatacatatg tgtttaggaa |
| 7741 | atgtgtatat atgtgtgtgt gtttgtgtgt gtggatactg tattagttaa gacaaaaaaa |
| 7801 | tctggcttca tatgttataa aataatgtct ggagctatcc actcaagtgt gctttcttgt |
| 7861 | ttctctgttt tttttttttt cctatttcat tcagtggttt tcactgcctt tgggaaaaag |
| 7921 | tgacacagca aaacacttag aagaatcaaa tgtttatcct ttgagaatgt ggtctgtaca |
| 7981 | taagagaaaa catttagaat caaattatga gactaaacca gtttccctca cctgcagcta |
| 8041 | gataaaaatt tctaagagga aggagagaat caggaaagat tgaagacttg actccctgat |
| 8101 | aagggttctg cccgagttct gagaatggag aataaaagac accctccccc tctctaatag |
| 8161 | attttgtcag tgaaggtcag agaggcccac gaaatcaggt ctggggagca aggtaaaacc |
| 8221 | cagaatttct acatgatcat gttaaagagg gaataaagga atatcattat agtgtatctg |
| 8281 | ggcaggtggg catgagacag cctgattgag ttcctgaaat cccaggtcgg tgtgggagca |
| 8341 | gcagaatatt ttaggtggct gagagctcca tagtttcttt ctttctttct ttctttgaga |
| 8401 | tggagtctca ctctgttgcc caggctggag tgtagtgacg cgatctctac tcactgcaac |
| 8461 | ctgtctccct ggttcaagta attatgtctc agcttcctga gtagcbggga ttacagatgt |
| 8521 | gtgccaccac acctggctaa ttttttttta tttttagtag agatgggatt ttatcatgtt |
| 8581 | gcccaggctg gtctcaaact cctgacctca agtgatccac ctgcctcagc ctcacaaagt |
| 8641 | gcbgggatta caggtgtgag ccaccagcag tcccagctac tcaggaggct gaggcagaag |
| 8701 | aatcgcttga acccgggagg tggaggttgc agtggaccga gattgtgcca ctgcactcca |
| 8761 | gcctggtgac agagcaagac tccatcttaa aaaaaaaaaa accttctcaa ggtattttct |
| 8821 | gtgcttcttg ttttctcttt tgtatttttc atctttatat ctttgtgttt cattctggat |
| 8881 | aacttttagt gacctgtctc ctagttcact aattctcttt ttagctatgt ctagtattat |
| 8941 | aatttgttta ttgaattatt aagtttaggt atcaaatttt cagctttagg atatctaatt |
| 9001 | tgccacttgt tttctgccat gatttttttt ttttttttga ggtggagtct tactctgtca |
| 9061 | cccaggctgg agtgcactgg tgtgatcttg actcactgca agatctgcat cccgagttca |
| 9121 | catcattctc ctgcctcagc ctctcaagta gcbgggacta caggcgcctg ccaccacgcc |
| 9181 | cagctaatta ttattattat tattattatt tgtattttta gtagagacag ggtttcacca |
| 9241 | tgttagccag gatggtctcc atctcctgac cccatgatcc acccaccttg gccttccaaa |
| 9301 | gtgctgggat tactggcatg agccactgca cctggcttct gccataattt ttaaccttga |
| 9361 | gttttaccta cttaaacata gcaaacacag ttgtttatat atttatctaa taattccagt |
| 9421 | atcaggagcc tctggagtct acttttgtct actttcattg ttttttgttt tttaaattta |
| 9481 | cattaacagt gtctagtctg tatttatgcc tggttacttt tgattgtgtg ctagacattg |
| 9541 | tttttggcaa ataatttttt aaacacaata tgtacaaatc atatgaagcc tagactggtg |
| 9601 | ttttgttcac caaaaaagat tttaaattac ttcagttacg ttcctaggga cactattaac |
| 9661 | tcaggatgat gttaattgaa gtttcagatt tgatattttc caggtcaact ggaccaactg |
| 9721 | tccctgctat atgatttatt tcctaaagca atatcaagtt cagctctgca cctctcttat |
| 9781 | atactatgga gctctcagtc acataaaata ttctgctgct ctcacactgc cctgtagttc |
| 9841 | ataagaggaa cagtttactg ttaatccgta ttactcttac atctagggtg tagctctttg |
| 9901 | agctaccagt ccaaagtgaa gaataattta ctgaattcct actttgtctg gctctaggca |
| 9961 | ctgatttttt ttaccctctt ggccacctat cttcaattgg aaaatgccct caattcaaaa |
| 10021 | atgctccaag tgccaagctt tcctatctga attcccattt tttcctgtat ctggctggca |
| 10081 | attcattaga atcctgctag ccctctgatg cttctaagat tttcatcttt tatttttatt |
| 10141 | tatttattcg agatggagtc ttgctctgct gcccaggctg gagtgcagtg gtgtgatctt |
| 10201 | ggctcactgc aacctccatc tcctagggtt aagtgattct cctgcctcag cctcccaagc |
| 10261 | agcbgggact acaggcatcc accagcatgc ccggctaatt ttgtattttt agtagagatg |
| 10321 | gagtttcacc atgttggcca ggctgatctt gaactcctaa cctcaggtta tctgcctgcc |
| 10381 | ttggccttcc aaagtgttgg gtttataggc attagccacc atacccagcc tgaagttttg |
| 10441 | attaaaaatg ctttactggg ctgggcatgg cagctcacgc ctgtaatccc agcactttgg |
| 10501 | gaggttgagg cgggcagatc acttgaggtc aggagttcga gaccagcctg accaacatgg |
| 10561 | tgaaacccca tctctactaa aaatacaaaa attagccagg tatggtggtg catgcctgca |
| 10621 | atcccagcta ctcaggaggc tgaggcagga gaatcgcttg aatctgggag gcagaggttg |
| 10681 | cagtgagccg agatcgtgcc actgtactcc agcctggaca acaagagcga gactccgtct |
| 10741 | caaaaaaaaa aaaaaaaaaa aaaaaaaaaa aaaaaaaaaa aaaaaaactt taccggaatt |
| 10801 | aaagcccagt catcttgaag ccatgatcat gacgcbgtgg aagaaccggt gaggtaggat |
| 10861 | gagacatatt ctcagatgct atgctgattt ggggcbgtga tgattttgga ccatagacta |
| 10921 | tgatgaggct tcaaaaagag tgcaatagtg tattttaatt tctttggtta gattcaaatt |
| 10981 | aatcttcaga aagacaaaat gcagatgtag tcttgttaga gcttgctgat gagactaaat |
| 11041 | tttccaagtg tttgaggaat gcctaacagg ggaaaggcaa agcaaactat ttttaatgac |
| 11101 | cttatggctc tgaattgcta aaagggagtc agtccaccag gctcaggcta cttggagtag |
| 11161 | aggatcctgt ttcagtgaca aactggctca tcccttaatc tgccataaaa tgatggctta |
| 11221 | gcatacatgt aggagcbggg gctaagggag aaggaggtgc tgtgttttgc agaagaagct |
| 11281 | acattctgta gtaaggcctg actcttccct ggccttggag gggaaatact tgtgagacag |
| 11341 | tggccaggat cagctgaagt gccctctctt cttgctttgc ctatgggaca ctgagcccct |
| 11401 | ttttgtggaa tatattcatc cagagaaccc tcacacctta taatgcataa agtgataaag |
| 11461 | gcttggagat ctggagaaac ccaaggtgcg atccctggct ctagaagaaa ctctgggcag |
| 11521 | ccagcatgat ttacttttct ctgctccaaa gactggagga taaattaaag gaaaagaggg |
| 11581 | tatgacccag caatccactg gtgcgagttg ttgctttaag caaagactac tgcttctctt |
| 11641 | cctgattttc ccctgaccat actctcccag aggtgtctcc cagcaaccac cagagttgtg |
| 11701 | gttaagtaca cctagccaat ccaataaatc taaaggagat gcagtccaca caaccttgca |
| 11761 | tgacttgtca tgtgagttac tgttctggag agacaaactc aggctggaaa cttatttgag |
| 11821 | atagcttatg aaaacaaaga taatttatga taaggataca ggcactctca tacaatctaa |
| 11881 | ggtagaaaaa cagctaagca tcagaacaaa ctggaccaaa gacttaaaca cttctgctcc |
| 11941 | tttgtgtaat tggtttcatg cgtttctctc tctcccttcc tctctctctt ttctctctgt |
| 12001 | ggactaggtt tttctacttt tcatatacaa attttaaaaa tacaatttct ggccaggtgc |
| 12061 | agtgactcac gcttgtaatc ccagcacttt gggaggccga gggaggtgga tcacttgagg |
| 12121 | ccaggacttt aagaccagcc tggccatcat ggtgaaactc catctctatt gcaaatacaa |
| 12181 | aaattagccg ggtgtgatgg tgcacgcctg taatctcagc tacttgggag gctgaggcag |
| 12241 | gagaatcgct taaacctggg aggcagaggt tgcagtgagc tgagattgtg tcactgcact |
| 12301 | ccagcctggg taacagagtg agaatctgtc tcgaaataaa tgaataaata agtaaaataa |
| 12361 | acaataaaaa taaataaaga caattttaaa aatttcccaa cattaagtgt cagcaatttg |
| 12421 | gagagggaca gctgtctctt gttctctctc ttctccaatt ctcaattcct aggtctgatg |
| 12481 | ctttccctgg ctcaactgac tatggttgtg gggtagggcc atgaaacaga aatatcacat |
| 12541 | taggatccaa cctttaatta tgtagatgga cagcagttta cagaaaaagt ggtggggagg |
| 12601 | tggagggagg tgctgaacag acattctaaa agggctccac caaagaaagc tatttgttat |
| 12661 | atttatgaac attctggaaa attctttcaa ttgtgttcat gaataaatta tgattggtta |
| 12721 | aaagctaaca cacatgtaga ttatataact tctaaaattt gtatttggta tctgaatcta |
| 12781 | tatattattt tggcatgtat agaaaaatcc cagatatttc aaaggctatc attagaaaaa |
| 12841 | cgttaatgaa aaggttaatg gaattctata tatttagttc ctgtgagaat gtccagttta |
| 12901 | actttcttaa tcaactgatg aagaaacaga actgaaatca caagattata aagatatttt |
| 12961 | aacgatgcat ttaggttttc attctaaatg ctgaaaaaag gtatccctgc aaatactggt |
| 13021 | taagaaatta agaagtccaa aacccaataa tgtagttggc agcctgttat aaagatttag |
| 13081 | agtattcaaa gataaaggca aataaaaaga ctacttttta taccagagta gaaacagttt |
| 13141 | attttcatga tcactactct tacttcaaat atatctatta tctaagttga tgcttgcaaa |
| 13201 | aagtcctgat tcttacacaa aggcagtcga ttcatggatc tcttagagag agagaaaaaa |
| 13261 | aaaaagctag ttgggtgtgt tacagttata tgaatcatgt aggatgctgc ttaacgctat |
| 13321 | atttatcatg gatgaaggca tgttttcagg ggaaactatg agtctaccta aagttaccca |
| 13381 | gttcacctct gttccaaggg actcatcttt tcagcatttt gtttagcatg ttacaaagta |
| 13441 | ccccgatgtc ttctaaacta ttaggattgc aggaggaaac tctcccagag ctgctagaag |
| 13501 | tcatccttga aagtttggat ttctcccgaa aacttgtatt tctatcattg ttttaactat |
| 13561 | cttcttgaat cctcttgatc ctgacctaca tgtcctcttc ccttgattgc atttaaattt |
| 13621 | agctgcatat aaccttgctc ttttccttct aatccaacct ataaaccata tcaggggagg |
| 13681 | atatgtgatt tgtcaatttt gttgcctcac ttcctcctca agaactttca gtggctccat |
| 13741 | tttacctctg agattaaatt gcagccactc atcctgagtt ttggtgttcc acaatctgac |
| 13801 | atatctagtc agctttgtgt tctagtgtgt ttgtgttgct ataaaggaag actgagacta |
| 13861 | gatagtttaa taagaaaaga ggttgatttg gctcacaatt ctgcttgctg gaagattggg |
| 13921 | catttggtaa aagccttagg ctgcttctat tcatggcaga agagtaagcg gagccttcat |
| 13981 | gtgtggaaat catagggcaa gggaggcagc aagggaggtg tggagaggtg ccaggctctt |
| 14041 | tttaacaacc acttctcatg ggaactaata cagtgagaac tcactgactc tttctacagg |
| 14101 | gagggcatta atttattcgt gaatgattct cccccatgac caaaatacct ctcattaggc |
| 14161 | cccacctcca acattgggat aaaatttcaa catgaggttt gaagggggga caaacatcca |
| 14221 | aactatagca ttctgctttg gccccctaaa acttatgtcc ttctcacatt caaatacaat |
| 14281 | catttcttcc taatagtccc taaaagtctt aacttgttcc agcataaact caaaagtcca |
| 14341 | aagtccaaag tatcacctgc gactcaaggc aacttcttta cagctgtgag cttgcaaaaa |
| 14401 | taaaaaatga attatattct tccatgatac aatggttgta caggcattga gtaaacattc |
| 14461 | ccatttccct aagggagaaa ctggccaaaa gaaagtggta acaggtccca tccaagtctg |
| 14521 | aaacccagtg cggcagacat tctttttttt gaggcagagt ctcgctccgt cacccaggct |
| 14581 | ggagtgcagt ggtgcgatct cggctcactg caagctctgc ctcctgggat cacgccattc |
| 14641 | tcctgcctca gcctcctgag tagcbgggac tacaggcagc tgccaccatg cctggctaat |
| 14701 | tttttgtatt tttagtagag acggggtttc actgtgttag ccaggatggt cttgatctcc |
| 14761 | tgacctcgtg atccgcctgc ctcagcctcc caaagtgctg ggattacaga cgtgagccac |
| 14821 | cgcgcctggc cagacattaa ttcttaaaac tccaaaataa tttcctttga ttccatatac |
| 14881 | cacatcctgg gcatagtagt gtgaggggtg ggtcctaagg ccttaggcag ccccactctt |
| 14941 | tggctttgct gggtgcagcc cacgtgactg ctctcacaga ttgaagccca atgcctgtgc |
| 15001 | ctttttcagg ctgcagttgt atgttgctgg tggctctata attctggggt ctggagggtg |
| 15061 | gtagccctgc tcccacacct ccaatagata atgcccaagt agaggctgtg tgtggttgat |
| 15121 | ctgaccctat ggcagacttc tgcctgcctt cccaggtgtt ccaataaatc ctctgaaatc |
| 15181 | taggtggaag ctgccaagcc tccaacattc ttgcattatg ggcacctgca gatttcacac |
| 15241 | catgaagcca ccaaggctta ccacttacac ccacctaagc agtggctcaa acagtacctg |
| 15301 | gggccattgg agccatggat ggagccagag tggccaggat gcagacagca gcatcctgag |
| 15361 | gcagcacagg gcagtggtac cccaggcttg tcctgcaaaa ttattttgtc ctcctaggcc |
| 15421 | tctaggcttg tgatgggagg agcagcctca aaggtttctg aaatgccttt ggggcctttt |
| 15481 | ttttccaaag tcttggctat tagaacctag ctcccactta gtcatgctaa tatctctcta |
| 15541 | gcaagtgttt ggctgcatcc ttgaattcct ctcctgaaaa cactctttct tcatctacca |
| 15601 | cagggccagg ctgtaaatct tccaaatttt tatgctttac ttggttttta gttacaattt |
| 15661 | acaactttag gtcactcatt tgctgccata tctagtttac aatcatattt acaattaaaa |
| 15721 | gcagtgtaaa ccaaaaagta tctgagacag gtctcaatca atgtaagggt ttattttgcg |
| 15781 | atggttaagg accatggccc atgacacagc ctcaggaagt cctgagaaca tgtgcccaag |
| 15841 | gtagttttgt gtagcttggt tttatacatt ttagggagac agaagttaca gacaaaaaca |
| 15901 | taaatcaata catgcaaggt atacattggt ttggcccaga aaggcaagac atctacaagt |
| 15961 | gggggcttcc aggtcatagg tatattcaaa aatttcctga ttggcaatgg ttgaatgagt |
| 16021 | taagctctgc ctgaacagtt gaagtcagct tgagttaaga taaagaggtt ggctgggcac |
| 16081 | tgtggctcat gcctgtaatc ctagcacttt taggaggctg aggtggtcag attgccacct |
| 16141 | gggcaatctg tttgagatca gcctgggcaa catgatgaga ccctgtcttt ccaaaaaata |
| 16201 | aaaaaattag atgggcatgg tggagcacac ctgtagtcct tgctactcga gagactgggg |
| 16261 | caggaggatt acttgagccc aggaggcaga ggttgcagtg agctgagatt gcaccattgc |
| 16321 | attccagcct gggtgacaga gccagaccct gtctgaaaaa aaaaaaaaaa aaagtgaaag |
| 16381 | tcaaggttct tgtcatgtgg atgaagcctc caggtagcag gcttcagagt gaatagatga |
| 16441 | tgaatgtctc ttattagaac ttaaaaggtg tcagactctc tggaaaaaac ttggtaaggg |
| 16501 | agagattctc tacagaacac taacttcctc cacaagagac aacattgcag ggccttttca |
| 16561 | aaatgtcaaa taaatatatt ttgggataaa atacttgtat tgtattgtat tgtattgtat |
| 16621 | tgtattgtat tgtattgtat tgtatcgtat ttttgagaca gagccttgct ctgtcatcca |
| 16681 | ggctggagtg cagtggcacg atctcggctc actgtaacct ccgtctcccc agctcaagcg |
| 16741 | attctcctgc atcagcctcc tatgtagctg ggattacagg tgtccaccac catgcctggc |
| 16801 | taattttttt gtatttttag tagagatggg gtttcaccat gttggccagg ctggtcttga |
| 16861 | actcttgacc tcaagtgatc tgcctgcctt ggcctcccaa agtgctggga ttactgggat |
| 16921 | tacaggcatg agccaccaca cctggacaat aaaatacttt tatttccttt aggtcttgct |
| 16981 | atgtcatgtg atgctatatc agagtcgggt tcaaatttgg tatcttattg ctacaaagag |
| 17041 | tctgtcttgt cagtcatatg atctctgttt taatgttaat gctggtcatt tgtgtctaaa |
| 17101 | ctccaaaggg ggagggtgta ataaggcatg ttgggtaccc tctcatcttg ctatggcatg |
| 17161 | agctagtttt tcaggtttct ttgggatctc cttgaccaag gggtccattc agttgattgg |
| 17221 | gggagtttga attttaattt tgatttccag cagccacgcc acttcttgaa tgctgtgttg |
| 17281 | cttagaaatt tcttctgctg ctgggcatgg tgactcatgc ctgtgagagg caggcacttt |
| 17341 | ggaaggctga ggtgggcaga tcaattgggc tcaggagttt gagaccagcc tgggcaacat |
| 17401 | ggcaaaaccc catctctaca aaaaatacaa aaaaaaaaca acaacaaaaa aacaaatcag |
| 17461 | ccaggtgtgg tggcatgtgc ttgtagtccc agttactcgg gaggctgagg tgggagaatg |
| 17521 | acctcagcct aggagatgga ggtttcaatg atcctagatc gtgccactgc attccagcct |
| 17581 | gagtgacaga gcaagatcct gtctcaaaaa caaaacaaaa caaaacaaaa tttccgccag |
| 17641 | atatcctagg tcatcactct taactgcagc cttccacaaa tccatagggc atggacacaa |
| 17701 | cacagccaag tttttttttc taaagcataa catggaaccc tttgctctag ttcccagtaa |
| 17761 | gtttctcatt tccttctgag acctgctcag ccttgccttt actatctata tttctatcag |
| 17821 | cattttggtc aaaaccactt aactaatctc taagaagttc caaactttcc ctcatctgcc |
| 17881 | tgtcttcttc tgagccctcc aggttcttcc aacctctgtc caatgccctg ttccaaagtt |
| 17941 | gcttccacat tttcagttgt ctttacagca acatttcact acttggtacc agtattctga |
| 18001 | ctttgtccat tttgcattgc tttaaacgaa taccggagga tgggtcattt acaaagaaag |
| 18061 | gggtttattt ggctcacagt tctgcaagcc tgtacaagaa gcatggtgcc aggatttgct |
| 18121 | tttggtgaag gcaaggaagc ttccattcat ggcagaaagt gaaggggagc ctccatgtgc |
| 18181 | agagatcaca tggcgagaga ggaagagcgt gagaggaggg gaaggtacca tggtcttttt |
| 18241 | aacagaggta caggcttttg agggaactaa cagattgaga actcgctcac tcccacccct |
| 18301 | gccagggagg tcattaatct attcatgagg gatccaccca cataacacac acatctcact |
| 18361 | aggccccacc tccaacattg ggatcaaatt tcaacatgaa gtttgggagg gcgaacatcc |
| 18421 | aaagtacagc accttgtttc ttgttgtttt ctaatatttg ttctttatcc caggaaatgg |
| 18481 | ggggtaggaa ggtgagttct tggtgtactc taagcagtca tgctcagcct gtactatcaa |
| 18541 | attttattcc atttattctt ctgttgaggc ttgcatgact tccctaaggt acaatggcag |
| 18601 | agatagccac atgggtagta aaatcagggg cagacagacc agctttctgc caggaattta |
| 18661 | cctcagggaa attcctcatc tttgactttc ctcgttctga cttttttttc ttttaattcc |
| 18721 | acctcctctc caaacctggc actattcctt tccgatcttt atccttgtcc ttactgtttt |
| 18781 | gaagttggct cttatgcctg tttgtctttg caatctgtct ctgcgtcgcg tgttggtagt |
| 18841 | catttatttt tgtccctagt catgattccc agaaccttgc tgtggtcatt ttgatgcccc |
| 18901 | accctttgac tattacaaac caggagagct catgcaagtg gccacatgct gtagtggtta |
| 18961 | agagcacagg ccccgtagct gaacttgaaa ctcagcatga caacatgctg gctgtgtgac |
| 19021 | taaggcaaat taaatgacca ctctgtgtcc ttattttctt atacataaaa tggagctaca |
| 19081 | atagtacctc ctcataggga tgttgtgaag cttcagtgag ttaatacaga tataatgatt |
| 19141 | agttatctgc ctccattaaa tccaatcatc aatactaccc agctttatta aaacttctga |
| 19201 | cttttgtttt ggatgtggcc aggtcctgaa ctgaattgtt ttttccaggt caaatttaaa |
| 19261 | tctaccctcc tttccttttt ctcaatgcca aattgttctt cagtttccat ctctagcccc |
| 19321 | ataatctttg atttctcttg cccacatgga tggttacctt ttctgaaatg tcatagctct |
| 19381 | tacagtgcta gccacctatt ttgatgccaa atctttacac caaccagtgt tatcacttaa |
| 19441 | tcaattctta catctatgtc ttaacttctc caaccaaact taagacttgt tggtgccaag |
| 19501 | aatcaaatct catacttttg agttattcaa accatacaga acagtagata ctgaataagt |
| 19561 | atttgtctga atgaattgtt tgaataactt aaagagccta gaagcggctg ggtgcgatgg |
| 19621 | ctcatgccta taatccgagc actttgggag gctgaggcgg gccgatcacc tgaggtcagg |
| 19681 | agttcgagac cagcctgaca aatatgatga aaccccgtct gtactaaaaa tacaaaaatt |
| 19741 | agccgggcat ggtggcatgc acctgtaatc ccagctactc aggaggctga gacaggagaa |
| 19801 | tctcttgaac ccaggaggtg gaggttgcag tgagccaaga tcacaccatt gcactccagc |
| 19861 | ctgggcaata aaagcaaaac tccatctcaa aaaaaaaaaa agagcctaga agctttccag |
| 19921 | ggtggtcttg ggggtattgg ctttagaaga ggaagcttga tagatgaaaa tttccagatc |
| 19981 | aacggcattt tatgtacttc tcagaaacaa ggtatgacta gactgaaaga tctgaagtca |
| 20041 | ggaagaaact tcttggtatc agtctgtgcc cttaggaaga agtgaggtca taagctctat |
| 20101 | tagcacacat agctgaaaaa ctgaaagagg atgtaagaga aaggattgtt aaaaaacaaa |
| 20161 | aacaaaaaaa cacaaaaaac caaaaataaa aaatctgggt gaggtatttg caatactaga |
| 20221 | gccaaagaat ttgacctaag aggccgggcg tggtggttca catctgtaat cccagtactt |
| 20281 | tgggaggccg aggtgggtgg atcacttgag gccagaagtt tgaaactaac ctggccaact |
| 20341 | tgttgaaacc ccatgtctac taaatacaca caaaaaaggg cccggcgcgg tggctcgtgc |
| 20401 | ctgtaattcc agtactttgg gaggctgagg tgggaggatc acctgaggtc aggagatgga |
| 20461 | gaccatcctg gctaacatgg tgaaaccccg tctctgctaa aaatacacaa attagccggg |
| 20521 | tgtggtggca tgtgcctgaa gtcccagcta cttggagggt gaggcaggag aatcacttca |
| 20581 | acctaggagg tggaggttgc agtgagctga ggtagcgcca ctgcactcca gcctgggcga |
| 20641 | cagagcaaga ctctgtctca aaataaacaa ttaactgggt gtggtggcac acacctgtaa |
| 20701 | tctcagctgc tcctgagcct gaggtgggag aatcacttga acccgggagg cagaggttgc |
| 20761 | agtgagctga cattgtgcca ctgcgctcca gcctaggggg gagaaaaaga aaaaaaagaa |
| 20821 | ttctgatcca ggcactgact cattgagcaa gtcatcttta ctgttcaggc ctcagctttc |
| 20881 | ttcctttgtt tttttttgag acagagtctc attctattgc ccaggctgga gtgcaatggc |
| 20941 | atgatttcag ctcactgcaa cctctgccgc ccgggttcaa gcaattcttc tgcctcagcc |
| 21001 | tcccgagtag gtgggattac aggtgcctgc caccgcgccc agctaatttt tgtactttta |
| 21061 | gtagagatgg gggtttcact atcttggcca ggcbggtctc gaactcctga cctcatgatc |
| 21121 | cacccacctt ggcctcccaa agtgctggga ttacagatat gagccaccgc acccagctag |
| 21181 | gcctcagttt tctaatgtgt aaaatgaaaa tatgcactag accttcactt gtttttttct |
| 21241 | atgtgataat tttttttaaa aaaagaaggt gtcatgttac attttatctt tatgtttaca |
| 21301 | tttcatcttg taaggttgcc tttgagcctt gacacagtga tttttctcat tcaactagtt |
| 21361 | tctctcccat ctcaactagt gacctcacca tccactaatt gtttaagcca gaaattggga |
| 21421 | acttttcctt ggttcctctt ccttgtttac ttcttccatc taccccatga gcaaatccta |
| 21481 | tctgttcttc cttaaattta gttcccagat ctatctcctg catctcaggt ctatgtactt |
| 21541 | cttcccatct cccctgctac tagtctgtcc agagctacaa ccacttccct tatagattat |
| 21601 | tggaataacc ttcttattgg tcttcatatt ttcactctga ctcccctctg atcaattttc |
| 21661 | tgcaatgcag ccagaattat cttttaaaaa tgtaagtttg agccaggcac agtggctcac |
| 21721 | gcctgtaatc ccagcacttt gggaggccaa ggtgggagga tcacctgagg tcaggagttt |
| 21781 | gagatcagcc tggccaacat ggtgaaactc tgtctctact aaaaatacaa aaattagctg |
| 21841 | ggcatggtgg tgggtgcctg taatcccagc tacttgggag gctgaggcag aactgcttga |
| 21901 | acctgggagg ccatatatat ataaagtttg atcacaccac tgtcctgctt aatctttttt |
| 21961 | tattttttaa cttttaaatt ttttaagaga agggtctctc tgtgttgccc agactggtct |
| 22021 | ctaattcgtg ggctcaagag atcctctcat cttagcctcc caagtagctg ggaatacagg |
| 22081 | catgtgccac cacacccagt gactttcctt cctaaaatgc ttcaatagtt tctttttctt |
| 22141 | tttctttctt tctttttttt tttttttttg agatggagtc tcgttctttc acccaggctg |
| 22201 | gagtgcagtg gcgtgatctt ggctcactgc aacctctgcc tcccgggtta aagtgattct |
| 22261 | tctgcctcag tcttccaagt agcbgggact acagcatgtg ccaccacacc tcaataattt |
| 22321 | tttgtatttt tagtagaaat gggtttcacc atgttggtca ggcbggtctc gaacagctga |
| 22381 | gcttgtgatc cacccgcctc ggcctcccaa agtgctggga ttacaggtgt gagccactgc |
| 22441 | acccagccac ttcaatagtt tctttttgtg cttaacataa agtttaaatt catgtccaga |
| 22501 | gcctataagg tgtcatatga ccaggcccct caaggtatat ccacttcact caagccatgt |
| 22561 | ttgtctcatc ttaattcttc aaacacccca cattctttcc taactcaagg tctttgagct |
| 22621 | tgctgcttct tccaggtgga ctgatcttag cccttccctt tgttgttgat tttttaactt |
| 22681 | tttttttttt ttttttgtga gaaagtcttg ctcttgtttt ccaggctgga gtgcagtggt |
| 22741 | gcaatctcgg ctcactgcaa cctccacctc ctgggttcaa gtgagtctcc tgactcagcg |
| 22801 | tcctgagtaa ctgggattac aggcacctgc caccacaccc ggctaatttt tgtattttta |
| 22861 | gtagaaatgg ggttttgccg tgttggccag gctgatcttg aactcctgac ctcaggtgat |
| 22921 | cctcccacct cggcctccca aagtgctggg attacaggca tgagccagcg ctcccagcct |
| 22981 | ttttaccttt ttttttttta atttcaatag gtttttgggg aacaggtagt ttttggttac |
| 23041 | gtgaaaagtt ctttagttgt gatttctgag attttagcac acccatcacc tgagcagcgt |
| 23101 | acactctacc caatgtgtag ctttttatcc ttcacccccc caagtctttc cctgagttcc |
| 23161 | caaagttcat tgtatcattc ttatgccttt gcattctcgt agcttagctc ccacttacga |
| 23221 | gtgagaacat acaatatttg gttttccatt cctgagtctc caattccacc caggttgctg |
| 23281 | tgaatgccat taatatgttc ctttttatgg ctgagtagta tttcatgata tatatataca |
| 23341 | cacacacaca cacacacaca catatataca cacacacatt tatatgtgta tatatacaca |
| 23401 | tatatatata tgtcacattt ctttatccac tcattgattg atgggcattt gtagccctgc |
| 23461 | cctttgaatg gctgacttct tcttatgctt cagaattaat actttgtaat tacattaata |
| 23521 | tgtttttttt aaaaaaaaac cttttacata tatattggtc tgtcacaata atgtataaca |
| 23581 | atattatagt ttctgtttta atgacttaac tttggcaaac tggtcaatga tttcattaaa |
| 23641 | actgatcttt ttaaaaataa tcagcttcaa tagacagttt aaccagattt gtcaactttt |
| 23701 | tgtttttggc acagtctcac tctgttgccc aggatggagt gcagtggtgc catcttggct |
| 23761 | cactgcaacc tctgcctcct gggttcaagt gattctcatg cctcagcctc ccgagtagct |
| 23821 | gggattagag gcacctgcca ccatgcccag ctaagttttg aatttttagt agagataggg |
| 23881 | tttcaccatg ttcgccaggc tggtctcgaa tgcctgacct caagtgatct ggctccctcg |
| 23941 | aactcccaga gtgctgggat tacaggcgtg agccaccaca cccggtctcc ataaaaaaat |
| 24001 | cttaaacaaa aggatatggt tggtgaaata caaatcctat tgcgcagtaa ttttcacaaa |
| 24061 | ttttaaaatt gacaatacct tcgcttcttt cagatcaatt atagtggctt tcaaatgtca |
| 24121 | tcgctcaaaa aagttcaaat gtcatcgctc aaaaaaaaaa caaaccttca ctagaaaatt |
| 24181 | aatcataaat tgatggtaca gactgggtgc agtggctcac aactgtaatc ccaccacttt |
| 24241 | gggaggccga ggtggatgga tcacctgagg tcaggagttc aagaccagca tggccaacat |
| 24301 | ggtgacaccc cagctctact aaaaaaaaaa aaaaatgaaa aaattagccc ggcgtggtgg |
| 24361 | tgcatgtctg taatcccagc tacttgagag gctgagacag gagaatcgct tgaatgcaga |
| 24421 | aggcggaggt tgcagtgagt cgagatcata acactgtaat ccagcctggg caacagaggg |
| 24481 | agactcctca aaaaatataa aaataaataa attgatgtta catttggaaa aactgctgaa |
| 24541 | attttcttct tctgcaaaaa gttagaaaaa accactgaat gattgaaaac attgacatta |
| 24601 | tttaattctt tgctttagag caagtactca gttcttgatt gaagtgattg agggattcaa |
| 24661 | acattgtcct tttgttttct tccggtaacg tcagaccagc atattttgtt attgctgctg |
| 24721 | gctgttttct tcaaaatttg ctttgaaaaa gatgtaaatg gccatttcct tatacttgtg |
| 24781 | attaaatatt tgttggcctt tccaccagtt ctctgcactg atcttcaaga aaaaatttta |
| 24841 | aaacctgcac acaaaatttt aaagactgaa cacagaattt taaagcatgc acatttttca |
| 24901 | aagcbgtttc tatctctttg gaagtttgtg tctgattaag ttcatctaag acttcactcc |
| 24961 | aggaaaaaag ttaacccaga aaagataaat agcctcagca gagagaaaaa tctactgatt |
| 25021 | ttcttgtgtc tacattttgt tttagatagc ataatacttc aaaagttggt actcatttct |
| 25081 | taaactttac tgtgtgcata gcttcaaaat gaatactttg ttgtgtgtgg gaaagccttt |
| 25141 | tcattgttat acttacaatc ttcagcatgg tccatccgtg aatctttttt aaaattgata |
| 25201 | aaaaggccag gcgcgatggc tcatgcccgt aatcccagca ccttgggagg ccaaggcaag |
| 25261 | tggatcacct gaggtcagga gtttgagacc agcctggcca acatggtgaa acctcgtctc |
| 25321 | tactgaaaat acaaaaatca gcbgggtgcg ttggcgtgcg cctgtaatcc cagctactca |
| 25381 | ggaggatgag gcaggagagt ggtttaaacc tgggaggcgg aggttgcagt gagccgagat |
| 25441 | tgtgtcactg cactccagcc tgggcaacag agcgagactc cttctcaaaa aaaaaaaaaa |
| 25501 | aaatggttaa aaagatgaaa taaaaatttt ccaagttccc ctcaaccccc ctaaaaaaaa |
| 25561 | atcatacatg aagaaacatt tccaaaacag tggagtttgg agattgattt gcacaagcac |
| 25621 | aaatgaggat ttaggataaa tttctttgac ttttacctga acactacagt cagtcttggc |
| 25681 | catagtttca gcattgccat gtccttggtc atgatagagg ttcatgtcca gcatatcaca |
| 25741 | attcagtcat atggtgacta ttatgtgagt tcaggagtgt ttatcctaga aatagaaaga |
| 25801 | cacccaggaa tgactccttt ctttcaaatt tgctgttctc aaaatgaaca tacttaagga |
| 25861 | ctttacattt gatcagggta taaaccactg ggaagactaa gtgctcagaa aaagaaccaa |
| 25921 | agacttggag ataggaacag agcctgaaat gaacagaaac tattctatac cccccatgaa |
| 25981 | cctagaaaca aatgtgtata gctaagcgta ttagtccact cgggatgctt taacagaata |
| 26041 | tcaataaact ggaatgcttc acagtaaaca tttatttctc acagttctgg aggctgggaa |
| 26101 | gtccaagatc tggtatctgc tgaggttcct cttactggtt tgcagatggc cgtcttcttg |
| 26161 | ttctatcctc acatggcaga gagcagagaa cagaccatct cttgtgtctg ttcttagaag |
| 26221 | aacattaatc ctatttatga gcactctacc ttcgcaacca aaaggcttca tctccaaata |
| 26281 | ccatcacttg gagatttagc cttcaacaca ggaattttgg gggtacacaa acattcaatc |
| 26341 | catagcactg agtctgtatg tgttgggaac tgattgataa attggaattc ttcaaattaa |
| 26401 | cttacatgta gaatacagta tttattaaag gataagtaaa aagaaatgtg ttaatttata |
| 26461 | gtgtatttat tattattaaa agtctatagg gcbgggcaca gtggctcatg cctgtaatcc |
| 26521 | cagcactttg ggaggccaag gtggggtgga tcacgaggcc aggagtttca agatcagcct |
| 26581 | ggccaagatg gtaaaattcc atctctacta aaaatacaaa aattaattgg gcatggtcag |
| 26641 | gcgcacgcct gtaatcccag ctacttggga ggctgaggca ggagaactgc ttcaatgaac |
| 26701 | ccgggaggtt cattcaagat cacgccactg cacttcagcc tgggtgacag agtgagactc |
| 26761 | tgtcttaaaa aaaaaaaaaa aaaagtctac agtaactgca attgtttaga atttaagcca |
| 26821 | acaagatatg ttttcttttc cgggagttgt attttttatc actgattgtc tacaattgac |
| 26881 | agtgcatgtc aaaaagcaga cttgtcgtgc tgcagtggct cacgcctgta atcccagaac |
| 26941 | tttgagaggg cgaggcagga ggattgcttg agcccaggag ttggagacca acctgggcaa |
| 27001 | catagtgaga tcccatctct aaaaaaataa aaataaaacc actcattttt gtcaatttta |
| 27061 | ttactgcttt taatttttct aaagacgatg tgctgctcca gctctgggta cacacatgcc |
| 27121 | cacgagagca agctcatgag agaagaaact acatcccctc tatccaccta tatttctaac |
| 27181 | gccttgcaca gtagctggca catagtggac atgaaataaa tatttgtgga ataaataagt |
| 27241 | gaagaagaat tttagaatac tttataagaa acaataaatc ttcagagatc aacatttcaa |
| 27301 | attagtaact ttatttacaa acctctcttc tgggttttat tatttactac aagtgcttgc |
| 27361 | aagacctgtt attgtacact catgtattcc tatcaaaggt aatcatcaga cattatattt |
| 27421 | cattaaataa tttaatggtg ctttctgttc tttattcatt aatttttttg tgtgtgtgtg |
| 27481 | agaatggagt ttcactatgt tgcccaggct ggccttgaac tccagggttc aagtggatcc |
| 27541 | tcctgccttg gcctcccaaa gtgctgggat tacaggcatg aaccaccatg tccaacaatg |
| 27601 | ttttctgctc tttagtaagt ctagccatat taaattttat gtgttttttt tttctttttt |
| 27661 | gagactgagt ctcactctgt cacccaggct ggagtgcatt ggcgcgatct ccactcagtg |
| 27721 | caacctccgc ctcccagttt caagcaattc tcttacttca gcctcctgag tagctaggat |
| 27781 | tacaggcacg taccaccaca tctggctatt tttttttttt ttttttttga gacgaagtct |
| 27841 | cactctgttg cccgagctgg attgcagtgg catgatcttg gctcactgca acctccacct |
| 27901 | cctgggttca agtgattctc ctgcctcagc ctcctgagta gcbgggacta caggcatgtg |
| 27961 | ccaccatgcc cggctgattt ttgtatattt tttaacagag atggggtttc attatgttgg |
| 28021 | ccaggttggt ctcgaactcc tgacctcgtg atccacccac cttggcctcc cgaagtgctg |
| 28081 | ggattacaga tgtgagccac cgagcccggc ctaatttttg tgtttttggt ggagatgggg |
| 28141 | ttttaccatg ttggccaggc tggtctcgag ctccggacct caggccatcc acctacctcg |
| 28201 | gcttcccaaa gtgctaggat tacaggcgtg agccactgtg cccagctcat attacatttt |
| 28261 | aaatggaggt agaatatcaa cctgaattca ctaagagaat gcaggacaaa ttgccctgat |
| 28321 | atcctgacac aaaggtgaag caggactttt ttgtaatttg aggatttaaa agcatggttg |
| 28381 | ctccaggcca ggcgtggtgg ctcctgcctg taatcccagc actttgggaa gccgaggcag |
| 28441 | gcggatcatt tgaggtcagg agttggagac cagcctggcc aaaatggtga aaccctgtct |
| 28501 | ctactaaaaa tacaaaaatt agcbgggcgt ggtcaggcgc ctgtaatccc agctacttgg |
| 28561 | gaggctgagg caggagaatt gcttcaagga acccaggaag cagaggttgc agagcccata |
| 28621 | tcgtgccact gcactctagc ctaggtgaca gagcgagacc agcctggcca acatggtaaa |
| 28681 | accccgtttc tactaaaaat acaaaaaatt agcagggcaa gctggcgggc gcctgtaatc |
| 28741 | ccagctacac gggaggctga ggcaggagaa tggcgtgaac ccaggaggcg gagcttgcag |
| 28801 | tgagctgaga tggcgccact gcactccagc ctgggcgaca gagggagact ccatctcaaa |
| 28861 | aaaaaaaaaa aaaaaaaaag tatggttgtt ccagtcctgg gaaattgaaa tagggggtaa |
| 28921 | aaaggctggt gggtgtggta ggcagaataa ttacttcttc cctctcccaa gatgttcagg |
| 28981 | tcctattccc catcctattc cctggaacct atagctagat tgccttatgg ggcaaaagga |
| 29041 | atttttcaag tgtgactaaa tttagaatca tgagttagag agattatcct ggattatctg |
| 29101 | tgtgggttta atgtaatcac aggggtccct agaaagaaaa gagggaagca gaaaagccaa |
| 29161 | aggagatgga atgatgggag ttgagatcag tcagatttac agatgcaata ttgtttccta |
| 29221 | taaattctgt ggtgaaagaa atgctatatt gttgctggct ttgaagatgg aggaaggggc |
| 29281 | tgagagtgaa ggaatgcaag tgaccttaaa ttggaaaaga caagaaaata attggccctg |
| 29341 | tagaggttat aaaagaaggg tggtccttct gacacactga ttttagtccg atgagattga |
| 29401 | ttttgaactt ctgacttcca aaaactgtaa gacaatacat tagtgttatt gtaaaccact |
| 29461 | acatttttgg taatttgtta cagcaatagg aaacttatat agtgggccct gggatccatc |
| 29521 | tgccctagcc gtttatctaa aacaaaagat cttataggga aagcaaacaa acaaacaaaa |
| 29581 | aatacagaaa caaagcaaaa caaagcaccc ctatgctctg agcttgggcc tggtaagggc |
| 29641 | actatgagcc catgatttag catgttgctg ggaaatctcc ttccccctgt tgagttgcca |
| 29701 | gaatcgtgga agcagatggt gtgggggatt caggctcctc cactgctttt ctcagccaga |
| 29761 | cctttgagga gagcttggct gaagtcttcc aagctttatc cccttgtagc cattgttttg |
| 29821 | agccatctca aacattaagt agctcttgag ggttgaattg agtccttcct aaagacagac |
| 29881 | taaagtccta gtctccagga cctgtaaatg ttcccttatt tgtaattagg atgtttacag |
| 29941 | atgtaatcaa attaaaatga ggtcataccg gactagggtg ggctctgatc caatatggcc |
| 30001 | ggcatcctca taagaagagg agaagagaca tagacacata gggaaaagac cgtgtgatga |
| 30061 | tggcagagat tagagtgatg tgtttacaag ccaaggaatg tcaaatattg ccggcaatat |
| 30121 | cagaaactaa gaaaaaggca tggcacagat tgtctctgag agcctctcag agagtatggc |
| 30181 | cctgctgaca ccttagtttc agaggtctag catccagaac tctgagagaa cagatttgtg |
| 30241 | ttgttttaag acacccacca tgtggtaatt tattacagta gcccttaaac taacacagtg |
| 30301 | accttgtgtc ttctgccaga gggatttgat cacactggtg aggaagggtc ctggtccata |
| 30361 | ataacccaaa tttctgccag ggaagaggag attgaaaggt cccagtgatc ttggcctatt |
| 30421 | tacttgggag ctcttccaca gaacaaatga actcctgaag atgagctgct acaaggattc |
| 30481 | tgtgctttgg acagaattgc acttgtctct tccccctgct gtcactccct gactaggaaa |
| 30541 | ggtccaagct gtgaaggaat cccccccaga agagacttgt aagcattaaa gacctgtgga |
| 30601 | aaactaagag ggagggtgga tagaggagtc tggagaccga ctaaccttct gagctgctta |
| 30661 | ttgcctgaag tgggggtgga gtgggctgca aacactgttg tatttggggg acacatcaca |
| 30721 | gatgcttatt tgcaccttgg actttgtcag gacactctgg ttacagcaca actttgtgaa |
| 30781 | catggatcac aagatacttg gaaaagcagt gtttgcatta atcagattag gattagctaa |
| 30841 | aattttaatt aaagaaccag agagtacttc agaggcaagg agatgatagt tacctgggat |
| 30901 | tacttgctat ttgtgaaacc aaccagctga ccacttgtgt tgtttgtccc aaggtataat |
| 30961 | aataactaga tgtttgcata ttgtgattgt ttctgttcgg atttaatggc tgatctattt |
| 31021 | atcatattaa aagagggatc aagttcaaag atttcaatgc tctttatctt ctttctatat |
| 31081 | atgatattta tttttaaatg tccatattaa atatacatat atacacacga ttctcagaat |
| 31141 | tacgaagaat gtgcbgtgta gcattcaatt atatatataa tttttttttt gagatggagt |
| 31201 | ttccctcttg ttgcccaggc tggagtgcaa cggcatgatc tcgggtcaca gcaacctctg |
| 31261 | cctcccaggt tcaagtgatt ctcctacctc agcctcctga gtagcbggga ttacaggcat |
| 31321 | gtgccaccat gcbgggctaa ttttgtattt ttagtagaga cggggtttct ccatgttggt |
| 31381 | caggctggtc tcgaactccc aacctcaggt gatccaccgg cctctgcttc acaaagtgct |
| 31441 | gggattatag gcgtgagtca ccaagcctgg ctccaattct gtatattttt aaatgtaagt |
| 31501 | ataaagatca aagatacaaa gtatattcac atatcagttt ccatgttgtt attattatta |
| 31561 | ttatttgcca ttttaaccat ctccagatga agaaaactga atgtaaagtt aaatatctcc |
| 31621 | ttaactttta ctctatttaa aaagagactg aattatttgt gaggtaaccc agttgtagct |
| 31681 | gttctactct tctctactgc tagattttgg aagaaccaaa aaggaataaa gcaaagcatg |
| 31741 | acacagaaga gaaagcagaa ttatactgta gtagtatgct catattttat cagagtttgc |
| 31801 | ctgtactttt gctgattttt ttttctccta gcttggacat tttaaaggct tattttaaat |
| 31861 | ttatctcttc tgtattaaca ggtgagaagt ggacaaatca atgtataaaa actactatgg |
| 31921 | ctatcatcat ttagaatttt gtcttaaaag taattggatt tctggggtcc tagacacata |
| 31981 | atgattagag atcatgccac cagttctata tggagccatc tcaattcatc ctttctcaat |
| 32041 | ttatcctttc caggcatttt tcttgaaact gcctaagtac tggcgtctcc ctacgactat |
| 32101 | tatatctgaa aacacattca gttttcaaac cagctgaatt ttatgcctga ctattccttt |
| 32161 | taacttatac caatgaaaat cctttaataa attcactcac aattgctcca ctttctcaaa |
| 32221 | cagagcacaa agcatctaac aatatttctt catgattgat agcatacaca ctcttgactt |
| 32281 | catattcttc aaaatcttgg tatttttata agcattagtg cctttttttt ccccagtcag |
| 32341 | aagcactgac ggatttattc tattgggtgt tgtcttctgt ttggtcttta gcttttctta |
| 32401 | gctgtgatcg tttattgctg aataattaag ggcaattctt tcccactgaa atacttttca |
| 32461 | agttaaacat tttttcctta aatttttgcc ccaggctact tctagatcca gcgttgttcc |
| 32521 | agcttactga gcattccaga gggctaaggt ccaagttagc caaggtttta aaatgttgac |
| 32581 | catgtggacc tgaattcttt ccagttacat atttgcatac ttttaacagg agtggttatt |
| 32641 | tctcgtcaaa agacagaacg ctggaaatac cagggcaaaa ctatgtgttt ttttcttggt |
| 32701 | gatatcttga tcttagcatt ttactctctc ttcctggttt ctagcttgac ctttgtattt |
| 32761 | tagaggagag taatagagta acagtgcact gagaagcaat gggacatgac agaatagttt |
| 32821 | cagcagtgaa agtcagggaa gctggtttca accattcatt cacaagctta aaggactttg |
| 32881 | gtatctgact ttgtggatgc cactttctca tctgtaaaat aagggggttg gatcgtgtga |
| 32941 | tttataaggg gctttcttac tttctaacat tccatattct ataaagacag ttaaagtctc |
| 33001 | cagagagtaa agaatgtaga aaattcctga aatttactca gctcctttat tcctaaatat |
| 33061 | ttttgaattc tgaaattatt attattatta ttttttgaga tggagtctca ctctgctgcc |
| 33121 | caggccaaag tgcgatggca caatctcagc tcactgcaat ctctgctgcc caggttcaag |
| 33181 | tgattctcct gcctcagtct tctgagtagc tgggattaca ggcatgtgcc accatgcctg |
| 33241 | gctaactttt gtattttcag tagagaaggg gtttcaccat gttggacagg gtagtatcaa |
| 33301 | atttctgacc tcaagtgatc cacccgcctc ggcctcccaa agtgctggag ttacagccaa |
| 33361 | agcacctgac ctgaattctg agttttgatt ctgttttttt tttttttttt ttgagacaga |
| 33421 | gttttgctct tgtcacccag gctggagtgc aattgcacgt tctccgctca cagcaacctc |
| 33481 | catctcccgg gttcaagtga ttctcctgcc tcagcctccc aagtagatgg gactaccacc |
| 33541 | gtgcctagct aataattttg tgtattttag tagagatggg atttcactgt gttagccagg |
| 33601 | atggtcttga tctcttgacc tcgtgaccct ccctccttgg cctcccaaag tgctgggatt |
| 33661 | acaggcgtga gatactgcgc ccggcccata ctcacagatt tctttgtgat attatctcat |
| 33721 | ttgttttcac cacacccaga tgatgtggat ggtaggagaa atcccatgcg aataagtgga |
| 33781 | atatgttagt aactgcttcc ttgggtcctt ttgcctctgg acttaactct ttttttttga |
| 33841 | gacggagtct tgctctgtca cccatgctgg agtgcagtgg cgcaatcttg gctcactgca |
| 33901 | acctctgcct cccagattca agcaattctc ctgcctcagc ctcccgagta gctgggatta |
| 33961 | caggcatgtg ctgccacgcc tggctaattt ttttgtattt ttagtagaga tggggtttca |
| 34021 | ccatattccc caggctggtc tcaaactcct gaccttgtga tccacccacc ttgaccaccc |
| 34081 | aaagtgctgg gattagaggc atgagccact gcacctggcc tggacttaac tcttaaatga |
| 34141 | tgttacccag gaaaaccaat ctatgactaa ggcaaaaaaa aaaaaaaaaa aaaaaaaaaa |
| 34201 | aaaagttgca cagagaagag tggaaatatc agtaaatcag aagctaggca ggcctaatcc |
| 34261 | ctaatccact tggtgacctt ctgcaaaaca cctttctgtt agccttttca cccgtgaatt |
| 34321 | tttttttttt tttgagacgg agtttcgctt tggttagcca gactggagta caatggtgcg |
| 34381 | atctcagctc actgcaacct tcgccttctg ggttcaaggg attctcctgc ctcagcctcc |
| 34441 | tgagtagctg ggattacagg aacctgccat cacacccaga taatttttgt atttttagta |
| 34501 | gagatggggt ttcaccgtgt tggccaggct ggtcttgaac tcctgacctc aggtgatcca |
| 34561 | ccttcctcgg ctgcccaaag tgctgggatt acaggcgtga gtcactgtgc ctggcttact |
| 34621 | tgtgaaatta aagcttcaac ttttactcct taggaacgtc tcacaaattt ccacacataa |
| 34681 | atctaaagta gacactcctg cttgccaaaa gcatactctc taaaacattg gttctcagac |
| 34741 | ggacatagtg gctcatgcct gtaatcccag cactttggga ggccgagacg ggtggatcac |
| 34801 | ttgagatcag gagtttgaaa ccagcatggc caacatcgtg aaaccccatt tctactgaaa |
| 34861 | atacaaaaaa aattagccag gtatggtggt gcgtgcctgt aatcccagct actcgggagg |
| 34921 | ccgaagcagg agaatcactt gaacctggga ggcggaggtt gcagtgagcc agatcccgcc |
| 34981 | actgcactct agcctgggag atagagcgag actctgtctt ggaaacaaac aaacaaacaa |
| 35041 | acaaacaaaa aaattggttc ttgagcaggg caatttcacc tccaagggga catttgacaa |
| 35101 | tggcbgggga catttttggt tgtcacatct ggggttgggg agtgaagtgc tattggcatc |
| 35161 | taatacgtag aggccaggga tgctgctgaa catcctgcag tgcacaggac agcccctgac |
| 35221 | agcattaaac agtccaaaat gtcaattgtt ttttgaggtt gagaaacgct ggtctaaaag |
| 35281 | aaatgacagg acaggtggct tggctcatgc ctatcatccc agcactttgg gaggctgagg |
| 35341 | cgagtggatc acctgaggcc agtagcttga gaccagcctg gccaacatgg tgaaacctct |
| 35401 | tctctactaa aaatacaaac aatagccggg cgtggtggcc cacacctgta atcccagcta |
| 35461 | ttcagaaggc caaggcagga gaatcgcttg aacccggggg gcaaagattg cagtgagcta |
| 35521 | agatcatgcc actgcactcc agcctgggtg acagagtgag actctcaaaa aaacaaacaa |
| 35581 | acaaaaaaac agaaatgact caaatgttta cagtgattac ttctggatgg gattatgata |
| 35641 | attgtttctc tactgttcta aaaaactttc tgttctttcc aaatgtttaa tattgagcac |
| 35701 | ttattttaca atcattaaac aaagaaatga caacaactgt taaaaaaaaa ttcttaagaa |
| 35761 | ctgaaaggca aacaccacca ccactaaagc catgtccccc agatctaggt tgtgagtcac |
| 35821 | atgataccga cttcagaggc agcatgtctc aaggcctctc caatgtgtgt cagggacagc |
| 35881 | agtgggagta gggccctctg agtcagcctc tttgacctgg gatgctgcag gagatcttag |
| 35941 | caaacattca agattttcac tgagtcattt gcctgtggca ttgatctgct cactcaagtc |
| 36001 | ttccggtgtt ttggtgtgag ggaggctaaa gaggaaaaac agcbgtttag tttctcattg |
| 36061 | atttgtattg tcattgagca atacctggag cccaagtgga tgtcttttat tctgtggcct |
| 36121 | ccacagctgg gtcagtgtgg aaggcttcag accatgagaa attgttcctg ggagtcaatt |
| 36181 | attttaataa gtgagatatc agagtatatt cacagaaaga ggcttccctg gcactgtaag |
| 36241 | ggcagccagg aataaaataa aaatgcttct tcagtgaaga taattgtcca aattgaagac |
| 36301 | ataggaaata tttctaattt gcctgtgtat ttggtgaaca tttctctctc tctctctctt |
| 36361 | tctctctttc tctctctctc tctctttctg tctccataaa tgaagacatg ggaaaatcta |
| 36421 | ttaaaaatta aattaaaatg caacactttt acataaacaa aattcccaat cactctcctt |
| 36481 | actttacctc agcccaacca aatgtgagtt aaatctcttc cctttcccat gggacactag |
| 36541 | catcttggtg gcccagctca gtagctaagc atagagtaat gagtttgtta aataatttca |
| 36601 | attacattgt ttttgagatt ccagggtcac agggaaattc tgacctgaat tatctggatg |
| 36661 | aactctcaca attgtgcact gccttgttca aatttgggaa gtgctgagaa gcactcatcc |
| 36721 | aaggggtaga tctggacttc agctcatgca gcataataga atttcaggct cagtgatttc |
| 36781 | taatctgtta ccacttgcca ttttctactt gaagagggca gacaccttca ctgatctctg |
| 36841 | tttctatttc atcttttgaa aaatcgggat gataatggtt atctggttta catgctttta |
| 36901 | catgcttgtc aggagttatt ttaaagcact ttacaaatat aaaaatgtac aataaaattg |
| 36961 | cagagtcgga tgcagcaacc cctgtatcct ttgaggaatc tatcacaatt catacccctc |
| 37021 | ccaagccaac ttttctggta ctactctgga aaattgtgct tatacagtta aaatttttat |
| 37081 | tttcaaaaag ttgtgtaatt ccctttttca accatttttt tttgttataa gaaatgcaat |
| 37141 | taaaaacata cttttctttc caaatagaag agcctattct gccttataag aattgtttga |
| 37201 | aagattgaag gacaaatgaa gtcatacaac ttctctgata ccatattgaa ctcaaatgaa |
| 37261 | cacattttga ggtaagaaat gagcctggaa gatttttctt tttttttttt ttgagatgga |
| 37321 | gtcttgcttc gtcgcccagg ctggagtgca atggcgcaat cttggctcac tgcaacctcc |
| 37381 | gcctcctggg ttcaagtgat tctcctgcct cagcctcctg agtagcbggg attacaggag |
| 37441 | tgctccacca ggcctcacta attttttgta tttttagtac agatgggttt tcaccatgtt |
| 37501 | ggccaggttg gtctcagact cctgacctca tgatccaccc gccttggctt cccaaagtgc |
| 37561 | tgggattaca ggcgtgagcc actgtgcctg gcaagagata gaatttttca caaaaataac |
| 37621 | tcataccaga aactttgtag gcccccaccg atgcccataa tctttaggaa acaaactcta |
| 37681 | gtgtcaccta tttcctgata ccttctgtaa cgaccaggtc atattctgag ttcctacagc |
| 37741 | actcagtgtt tctcatcgga gctgtagcaa tggagtaata aatggcactg ctcaggaaga |
| 37801 | gagaattcag aaagaaaaga gcagggccta gaaaaggaac aaacttatcg gatgtgtaga |
| 37861 | gaaagaatct gcaaagcaag taataaaatc cagaaaaacg tggtatcatg gtggtcacaa |
| 37921 | aaaaaagagt ggttaaattt tcgaaaatgg agacaaacca ctcaccatga tcgtgccatc |
| 37981 | tgaatagaaa cacagaaatg atgacaaaaa aatggctaaa gaaagaaggt caacaaccat |
| 38041 | gtccaatgct ttggatatta agaagtgttc agatggattt agcaagtaga aagtcactga |
| 38101 | cacttggtgc acaaccagac ctcaatgtat ttaggaggaa actgttattt tggaacaatt |
| 38161 | gaaagctttc atttggctga gaaatatcaa ctcattctta aataggtatg ttagaaggag |
| 38221 | cctctgggcc tgatatctcc ttgattacaa ggaaaatgaa taatagttgc gtctgataac |
| 38281 | catgacatat cacccctatg tttgcttgta gctttcagca gctcagaaca ttgttgaaaa |
| 38341 | cactcattat cccaatatcc ccaacaggga agtgttaaaa cctgccttgt gcaactgtca |
| 38401 | atctctgatg attagataaa aacaattatg tcatgagttg tagctattgt tatttacttc |
| 38461 | ccaagagcca gattacacag gtatctgatt gctgaagcaa tgtctggatg taccacgaaa |
| 38521 | ttccacatgc atgtacagta taaacacctc tggctatcac cttatctaat tttgatcaga |
| 38581 | tacaggttaa tcccctcctg tatctttata tgtcctgaat ttgcctcatc cacctgaact |
| 38641 | ttgccataat ttactctcaa tttgtatgtg tctgtgatgg agttgttgtc attttccttt |
| 38701 | tctttttctt ttttttgagg ccaagtctct ttctgtcacc cagactggag tgcaatgacg |
| 38761 | cgatctcagc tcactgcaac ctctgcctcc cgggttcaag taattcccct gcctcagcct |
| 38821 | cctaaatagc tgggactaca ggtgcatgcc accatgcctg gctaactttt tgtattttta |
| 38881 | gtagagacgg ggttttaccg tgttagccag gatggtctct tgatccgccc gcctccgcct |
| 38941 | cccaaagtgc tgggattaca ggcatgagcc accgcgcccg gcctcatttt ctctatctgt |
| 39001 | ctgcttaatc aggttttgca agtttcacat ttcctcaact aaacttcatt ttaccaccca |
| 39061 | agcaaacttc attataatta ttttattttt ctgatgacat cagatttctg taggggtacc |
| 39121 | tattagctag agatacttag attttatttt cccagcatgt gactatttcc cattctatac |
| 39181 | aacacaatgg caagagcagg agtatgtttt tggacaatta aagagagaaa aggccgggcg |
| 39241 | cggtggccca tgcctgtaat cccagcactt tgggaggctg aggtgggcag atcatgaggt |
| 39301 | caggagatca ggagattgag accatcctgg ctaacacggt gaaaccccat ctctactaaa |
| 39361 | aatgcaaaaa attagccggg cgtggtggtg ggcacctgta gtcccagcta ctctggaggg |
| 39421 | tgaggcagaa tggcgtgaac ccgggaggca cagcttgcag tgagccgaga tcgtgccact |
| 39481 | gcactccagc ctgggcggca gagcgagact ccgtctcaaa aaaaaaaaaa aaaaaaaaaa |
| 39541 | gagagagaga aaataactca gcttcattta gatttctatt attcttctct gatccatata |
| 39601 | gtggatgttc acagaagtgt aggaaccaaa actatgcaag ttaaactgtt aattttagaa |
| 39661 | gtttatagca gtgatgtgga aggctgacca aagttggcgc tttggtctca ctataagcca |
| 39721 | tagtaataaa tacattaaca atgtccacaa acaacagtag acaccattta gtaagggctt |
| 39781 | gctccaagcc aggcactgtt ttcagcttaa gtctcacagc cttgtgaagt agattctgtc |
| 39841 | ccatcttaga gcaagttggt ctgaggatcc tcaagggtaa ggtctcttgc caaaggtcag |
| 39901 | cagaggtagt gagttcagaa ctgggattta aatccaggct gttctatttc tattccacaa |
| 39961 | ttctgcctca actgcttctc tacattttag gcacacgttt gaatactgaa aatttgggtc |
| 40021 | acagagttgg agatgtttct tcttctaggc cccaaaccgg agcggggtgc agtggctcaa |
| 40081 | gcctgtaatc cgcactactt gggaagctga ggcgggagga tcgcttgagc tcaggagttt |
| 40141 | gaagatacag tcagctatga tcctgccact gcactctagc ctgggcaaca gaacaagatc |
| 40201 | ctatctctaa aaaaaaaaaa aaattaaaat tttaacacaa gggcccaaac aagtcaacag |
| 40261 | taattacaac atgatcttta ctactgtcta ataacatctc acagtgcttt aaacatacgt |
| 40321 | agttaccatt ctgtccactt ggttgcctgt aatattaact cagtaagtag gaatacttcc |
| 40381 | tgccctgact aatatactca taaatatatg ctctaagtca agggtcttgc aggttctgat |
| 40441 | ttaaaaaaca caattttttt gagggtcact ggctttacat tatctcattc ttttcaagtt |
| 40501 | cctttgtacg taaaacatcc tatgctcagt tatatgatct gttcaacctc ctgcttgaca |
| 40561 | gatatgaaaa cagtgctctc atgtaattta tgtaatttac atttttacat atttagcagt |
| 40621 | acacctttgt gctatgttat attgtttgag aactaatctg tttttctgat ggctggaagt |
| 40681 | ctaagtgaaa agattataca tgaaaataat tcatgtttat tatcactagg agaaagtaag |
| 40741 | acaatttagt ttgattcaca agcatttgaa tccctattgt gtcagacatt gtattggaaa |
| 40801 | ctggggatac aaggaagata taacctcatc tctcagagtt ccctagttat cccatacata |
| 40861 | tatacaatta ttatttgtca attaaatttt ttttaaaaat ttagaaagga gtttccaagt |
| 40921 | aagaaaaatc atagcgaaat ggtataattg gtataataac agttaattag ctatagtatg |
| 40981 | aaaatacaga ggaagatcta actaagttgg ggattattaa agaaaattta aattagctgg |
| 41041 | gtgtggcggc agacgcctgt aaccccagct acttgggagg ctgaggcagg agaattgctt |
| 41101 | gaactcaggt ggtggaggtt gcagtgagat gagatcactg ggtaacagaa caagactccg |
| 41161 | tctcaaataa aataaaataa aaaataaaga aaattggaca gagatgtggc atttgaactg |
| 41221 | tctttcagat taagaagaaa gttactagtt agccaattca aatataagat ttacaaacat |
| 41281 | agagtacagc atgagcaaag gtgtggaggt acaaaaagaa taatgttttt gaggggagaa |
| 41341 | tagcaagtac tctgggggtg gccaaagttt gagttgtgtg gttttggtgg tggatggaga |
| 41401 | tgcaggaaga ttaggaagta gattgagatc agattgagaa aggtcttcca gaccagatga |
| 41461 | aaaattttgc catatttagg caatagggag ccccagaaat tgttcaacca tcatcagctt |
| 41521 | tacatttcac tatggtaatt tggcttcata agaagcatgg gttggagatt gataagagca |
| 41581 | gactccaagg ggccaattca ttaaactcaa ctgccaataa tgcaagagac aatgaaagcc |
| 41641 | agaatgaaca cagtgaccat ggatgccaga ggcatttcta ggatttttgt agaggactta |
| 41701 | agagaccatt tgggagggga ggaaggcaga agataagggg aaagaaggag ttgatatctt |
| 41761 | tgatgactga tggcactttt gctaagatga agaataaatg gtagcaagaa taaattgact |
| 41821 | gggcgcagtg gctcatgcct gtaatccaac cattttggga ggctgagatg ggtggatcac |
| 41881 | ctgaggccag gagctcgaga ccagcctggc caacatggtg aaaccccatc tctactaaaa |
| 41941 | ataaaaaaaa ttagcbgggc atggtggcgg gtgcctgtaa tcccagctat tcgggaggct |
| 42001 | gaggcaggag aatcgcttga acctcgaagg tggaggctgc agtgaacgag atcaagttat |
| 42061 | tgcattccag cctggacaac aggagcaaaa ctctggctca aaaaaaaaaa aaaaaaaaaa |
| 42121 | aaagtataaa ttgggggagg ggaggagata taggattcct attggaatgt attgagtttg |
| 42181 | agattccagc ctggacatat ggcactcttg aattgtttcc taggcgatca tatcactgtc |
| 42241 | ttgatgatat ctttaatcac acatatcact tgtggggaaa gaagaaactt caagagtttt |
| 42301 | acacaccaat cctttacttt gccatctaga caaattatat ttttaccaat gccatttttt |
| 42361 | gttgttattt tgtgggttct gcttaaaact tcccctatat ttttctaatt atggtaacct |
| 42421 | agggaaaaca tcaaattatg ttgataaaat tggctacaat ctggctctaa tgataatagc |
| 42481 | ttagaatcat gaagcagcaa tattttatcc tgagagcaaa caaactttat cctgaacaca |
| 42541 | tgtgttcttt tgccttattc atctaatatt acttgaaact tttatttttc cactttgaat |
| 42601 | agtagattct gccaagtgtt ttaaaagctt ttctcttttt aggggaggag gggaacagct |
| 42661 | tttctccctt ttgtctgata actgaggagt gaagatttaa ttggtgagaa aaatatacac |
| 42721 | actataaacc tcagaatgtt cccactgctt ttaatgtttg atgtgcctga cagattaccc |
| 42781 | tttcaaaaca gataatagga taggtggtgc tggaaaaaaa cttttccatc caagacaaaa |
| 42841 | ccacatggac attgaaaaga actggcattt gcctagacat ttagtggggg acatgtcctt |
| 42901 | agggcacaga ttccatagtg aaaggctctt ctcccccttc cacacactcc agctctctct |
| 42961 | agaaggtata atggaaagaa ctctgagcaa gaatcaggaa gttggccttt gttcctgact |
| 43021 | gtgccacttt gtggaactgg gcagaactta cctcattctg tgctttagca gcttcatttg |
| 43081 | caaaaattaa tgattacctc aaatgatttc tgattttagc caaaattaaa tacagtagtt |
| 43141 | ttaaaacaac tgctacatat taactactta cgtatgtaat tttgcactca aaataaatta |
| 43201 | tattatggaa aagaaactca acctatgtta accatccctg tactgatgag gaaactaaga |
| 43261 | cttaggaaaa agaagtgatt tactcagtat tgggcagtta gtgagcattt ttgagccaag |
| 43321 | gtcttacttt aaccagagac ctttgcataa tattgtactg ttactaaaca ctttctatta |
| 43381 | tttgactaga ggaacacaac atattgatgc atttgaaaca ataaaataat aaatattttt |
| 43441 | ccttaccctc ggcagaaaca ggatgatgag aaacattgac taaaaattta atcaagcctt |
| 43501 | aaggacaaat agtatcacag ttttgaatag gagattgggt accttggaag taattatgaa |
| 43561 | gaggtgtttt aactcagcag taggctcttt cttattcctg ctaggaatga agaagcacaa |
| 43621 | attgaaagtg aagaaggagg aaataaaaca ctgactctat gtgtaagaaa ggtgacttgc |
| 43681 | aaattatgag gcagttagga aaatgtttat tttttcttat tttataggct gtatatattt |
| 43741 | gagaattaat aattgtcctt tggagggtgt gtgtgtatgt gtatgttgga gctttgtgtg |
| 43801 | tgttttagtc cattttccta ctgctatgtg aagaaatgcc cgagacggta atttataaag |
| 43861 | aaaaagaggt ttaacggact caccgttcca catggctgtg gaggcctcac aatcatggtg |
| 43921 | gaaggtgaag gaggagcaaa ggcacatctt acatggtggc aggcaagagc gtgtgtgcag |
| 43981 | gggaattgcc ctttataaaa ccatcggatc tcacgagact tattcactat cacaaggaca |
| 44041 | gcatgggaaa aacttatccc catgattcaa ttacctccca ccagctcccc tcaagacaca |
| 44101 | tggggattat gggagctaca attcaagatg agatttgggt ggggacacag ccaaactgta |
| 44161 | tcagtatgcc tgtgtgtatg catgtgcacg tatataaatt ttttcactag tgactgatgg |
| 44221 | accatctata aaataaacaa aagagaagag acagggtctc actttgcctc ctaggctgga |
| 44281 | atacaatggc atgaccatag ctcattgcag cctctaattc ctgggctcaa gtgatcctcc |
| 44341 | cttctgagta gcbgggatta caggcacgtg ccattatgcc caactaatgt tttgtttgtt |
| 44401 | tgttgtggag atgggagatg ggagtactgc tatgttactc aggctggtct tgaactcact |
| 44461 | cctggcctta agtgatcctc tggctttagc atcctaaacc actacaatct taaaaaggac |
| 44521 | cagtttcctg gattacctct ctccctccat catccactat ctgccgtcaa ctctatagag |
| 44581 | tcaagggcta tccctgcctt ttcaatagaa gccctcaaga agtcactcca tagggactat |
| 44641 | cttgggcttt gggaagtgta cagggttggg gtgggtggga aggtgaggag gaaaggccac |
| 44701 | tgtttcaggt ggggttggag ggagatggaa aatggaccac agaggttcag agaacaggcc |
| 44761 | ctttgtggaa agggggagac caaataatgc tgcgttgtga aaggtgaaac aggctgcaaa |
| 44821 | cagaaggagc ccacaggaag ccctgctctg agcagctgaa cattctgggg tcctcagact |
| 44881 | ccgataaaaa agcacattta gcctacagct ttatgccctt cctcctaccc ttgtggactc |
| 44941 | tgccacagac atgccctcca gattgattct atccacttgt ctctagtcta ctgctactat |
| 45001 | tttagtctaa ggccttctcc ccgctttcct gggttatggt cacagactcc tatctgagtt |
| 45061 | cccagcacca ggtgcccagt tgttttcatc tcttaacaca ttccacatat tatagcaaga |
| 45121 | gagatctttc tcaaatgcaa atcagacctt gttgcatccc aatctcaacc cctttagttg |
| 45181 | ctcttctctt tgccctcatg gtcaagttca agctctctag tgtgggggca gatgttcctt |
| 45241 | tataattttt ctgcttatgt ctcctgcctc aggcctcaca attctccacc tcacagatga |
| 45301 | tgtctcagcc atgatgagtt cctctcaaat cctttaggtt tcagagatgt catttcccct |
| 45361 | gggaacattt tcctgactcc tcgttccaag catatgtctg tctttatgtt cccatagcac |
| 45421 | ctgatcattg gatcatggta gggtttatca cggtctcgta tttgtctgct tacttgtctg |
| 45481 | tattcttcac ttctcaaata tgtcttcttt gttcatcact gtaactcctt tccccagaat |
| 45541 | gttctcagat atttacaccc atcttccccc tctgtgaagg gaataaatgg atatataaca |
| 45601 | ctgtattagt ccattctcat gccactatga agaaatatcc aagactgggt aatttataaa |
| 45661 | gaaaagaggt ttaaatgatt acagttctgc atggttgggg agaactcagg aaacttacaa |
| 45721 | ttatggcaga ggcacctctt cacggggtgg cgggagagag aataagtgca agtaggagaa |
| 45781 | atgccagatg cttctaaaac tatcagatct catgagactc actcactatc acaagaacag |
| 45841 | cacgggggaa accgcccccc atgatccgat tgcctctacc tggttccacc ctagacatgg |
| 45901 | tgattatggg aattaaaatc caaggtgaaa ttttggtggg gatacagagc caaaccatat |
| 45961 | taagcaccat cctcaaaata gccttccagc tgaagacagc taaggcactc atgtagtctt |
| 46021 | attttgtctc agacaaataa ttttaccttt gaatcattgt tcattaatct agattttaac |
| 46081 | ctgaggccct aaaaattgtt tatcatcttc tgggagatct tactcctaga tggtgtttta |
| 46141 | ttccacaggt taaatttaaa cttgggccaa atctccatcc ttgtggcctg tgagtactga |
| 46201 | atttgggact gaaagcctgg gactaactgg aagtgtggaa aaggaggagg gtgtggcgct |
| 46261 | gccctcaatg attttttttt ttttttagga tttctggtgg aaaaggagag acactcagga |
| 46321 | atccccagat aaacatggtt tagcttttgt agtcagatcc tttccccaaa tttactgctt |
| 46381 | ctttctccac cacttctcaa ccccccaaac tgaacttgcc tcttcaacac actcccttgt |
| 46441 | gccctataga cagtcacaag cttgacctat agagagcatg tatttcttga ggcaacgaag |
| 46501 | gtaggaaacc ctattctaaa atgtttctta cacttttggc tctgtctaaa ttctccattt |
| 46561 | ttcaattaaa atggaaacga gattagaatt ctattctagt tatgaatata atcagaacac |
| 46621 | aataaagcag aaagattgct tcaggctctt ctgttaacgt tacatttatt caacaactct |
| 46681 | ttatggggac ttgctatgag tgaggcacca ggctaggcac cgcagctaca aaggtgaaga |
| 46741 | gaacataggc tcttcttcaa agaaacttac actgtaagct ttatagttat gaaatcatga |
| 46801 | ttgcttacct taaatgttct tgacctacat tcttagatat tttgagtctt gagaaatttg |
| 46861 | tttatttttt tcattattat acaatgtcaa ttagctcagt ggaatccaag atgttcggct |
| 46921 | agccttctga tccaagatag tggaccaaac atttgtattt actcattgtg cccctccata |
| 46981 | cttctctgaa ataaaagtgt agatcttcaa aattaaacat atctataaag caaagggaac |
| 47041 | agaaggggac attatcagca gattagacat tccaaaaatt ttttagaaaa taaaagctaa |
| 47101 | attgaatagt aagacacgga attattagat gtgtttggaa aaccaacagc atgaacaaga |
| 47161 | taatccaaga aaaacaagtt gtcccttggt gaaaatggaa ggaatttgag aaatatagaa |
| 47221 | gtgaactaaa caataaatac agtcatccct tggtatctgt tggggactga ttccaggacc |
| 47281 | tccctcagat accaaaattt ggatgcccaa gtctctgata taaaatggta cagtatttgc |
| 47341 | atacagccta tgcacatcct actgtatact ttaaatcatc tttagattac ttataatacc |
| 47401 | taatacaatg taaatgcttt gtaaatactt gttatattgt attgtttagg gaataatgag |
| 47461 | aggaaaaaaa gtctgttcat gttcagtaca gatgcaactt tttttttttc cagaatcttt |
| 47521 | ttaacctatg gttggttgga atccacaaat gtagaacccg gctacagaga gctgactgta |
| 47581 | attaaaacca acagcttcta tttggtatac tgaaagagaa ttgggaaatc attaaatcca |
| 47641 | taaaataaga acaggatgga gtgaaaaaag ctggactctg tgacgaaatg gacatatgta |
| 47701 | tggataagaa tcaggaaagt tttcataaag gaagtgccaa actgagctag ttggccaaat |
| 47761 | gaactattct ccaggtggat ggggcagggc atttaggcag aggaagcaac aaagcacaga |
| 47821 | gtgaagccca ggaaactaca ggtagctgca gggagatgac ggggctacag tgtgcatgga |
| 47881 | gagaggccaa catggtgagg taggcaggag gagctcctga agggctccaa cctgggaagc |
| 47941 | caggctaaag agatggcatt ctatcttgtc agtaataaga agcattgaca ttttgtagag |
| 48001 | atgatgaatt gaggaaggga tttatgtggt catttgtggt tctggctgat ccccctgagt |
| 48061 | gctgtctgct agaaggattc caagggttaa gtcctgaggc gtgaagaaga accgatctgt |
| 48121 | aagatagctt aactaaggtg gtagcattgg gataagggtg tggggtgtgt gtgtgagggg |
| 48181 | gatacaaagt tattaaggtg gtagaattga tggcaacatt catcttgaca gagaatacag |
| 48241 | gatgaggagc agatttcaga ggaatataat gagccctttt ttagatcttt gtgaatgttc |
| 48301 | agaaatggca gcbggtgttg cataattgca aaattagggc ttagttagtt attggcttct |
| 48361 | gagaacgtaa ctgcagtttt tttctttccc tctgccccac tctttgaaag ggggtggggc |
| 48421 | tcaaagagta gtgtgtgtgt gtgtgtgtgt gtgtgtgtgt gtgtggtaaa tacttatata |
| 48481 | caaatttctt tagatttttc tttatctcct tcactccttt tcaacatttt ggctggttgt |
| 48541 | tctgatatta ccaaggtaat ccacaattat ggcaaatatt caaacaaaac aaattataga |
| 48601 | aagtccagaa aaaaaaactc tgaaatacct tttccagaga ccaccatcat gaacagtttg |
| 48661 | gtctacagaa ttacaaatct tttgaagtat atagtatatt cttttatgtg gccattcatt |
| 48721 | atattttatg ggatcttagt attattgctt ttaaattcat ttcttatatt ttaaatttga |
| 48781 | aatacttcaa aatatgcaga aaagtagaga aaataacatt aacaccatat acttaccatg |
| 48841 | tagatttaag agaaatctac actttgccaa atttcctttt tttttttttt tttttttttt |
| 48901 | ttttttgaga cagagtcttg ctctgtcacc caggctggag tgcagtggtg cgatctcggc |
| 48961 | ttactgcaac ctctgcctct tgggttcaag caattctcct gcctcagcct cctgagtagc |
| 49021 | tgggattaca ggtactcacc accatgcttg gctaattttt gtatttttag tagagatggg |
| 49081 | gttttgccat gttggccagg ctggtctcga actcctgacc tcaaatgatc cacctgcctc |
| 49141 | ggcctcccaa agtgctggga ttacaggcat gagccaccgc acccgaccaa atctccattt |
| 49201 | ttgtaaataa tttttcagat atagaaaact acccaattat ggcbgggcat ggtggctcat |
| 49261 | ggctataatc ccagcacatt gggaggccaa ggcaggcgga tcatttgagg tcaggagttc |
| 49321 | gagaccagcc tggccaacat ggtgaaatcc cgcctctaca aaaaatataa aaattagccg |
| 49381 | ggcatggtgg caggtgcctg tagtcccagc tacttgggag gctgagggag gaaaatcact |
| 49441 | tgaacctggg aggcggaggt tgcagtgagc tgagatagca ccattgcact ccagactggg |
| 49501 | tgacagaaca agactctgtc tcaaaaaaaa gaaaagaaaa gtaagaaaac tacctgatta |
| 49561 | ctattacttc tctctttctc tctctctctc tgtgttctag aggtttgcag tatcctgaag |
| 49621 | ctggtgtgaa tcaacctcac gctttttttt tttttctttt tttttgaggt ggagtctcgc |
| 49681 | tctgtcgccc aggctggagt gcaatggtgc aatcttggct cactgcacct ccacctcctg |
| 49741 | ggttcaagtg attctcctgc ctcagcctcc cgagtggctg tgattacagg catacaccgc |
| 49801 | catgcccagc taattttttg tatttttagt aaagatgggg tttcaccatg ttggccaggc |
| 49861 | tggtctacaa atgtatctat ccataagcaa taccgtatat agtaatattt ttattattct |
| 49921 | attatttcta ttgaatgttt atattcatag tatcacactg tacacatcct tttgcaattt |
| 49981 | gctttcttta gaagcaacaa tatatttttg agatttatca tgttgctttg tgtagattgc |
| 50041 | ttactttttt tttttgatgg agtttccctc ttgttgctta ggctggagtg caatggcgta |
| 50101 | atctcggctc accgcaacct ctgcctcctg gattcaagag atcctcctgc ctcagcctct |
| 50161 | tgagtagctg ggattacagg catgtactac cacactcggc taattttgta tttttagtag |
| 50221 | agatgggctt tctccatgtt ggtcaagctg gtctcgaact cccaacctca ggtgatctgc |
| 50281 | ccgcctgggc ctcccaaagt gctgggatta caggtgtgag ccactgtgct tggccaatta |
| 50341 | tttacttttt aatttatttt atgatacaca atttgtctct ttatctcact ttattttttg |
| 50401 | attttttttt ttttaaacca ggatctcact tggtcaccca ggctggagtg cagtggcgtg |
| 50461 | atctcggctc actgcatccc ctgcctccca ggtgcaagca attctcctgc cttggcctcc |
| 50521 | tgagtagcta ggactatagg gtgtaccacc acatctggtt aatttttgta ttttagtaga |
| 50581 | gatggtattt tgtcatattg gccaggctgg tcttgaactg ctggcttcga gcaatttgcc |
| 50641 | cgccttggcc tccaaactct ctttattttt tagatattgt taacggtact atgggcagta |
| 50701 | tccttgaaca tctctctttg tataaatgtg aaagacattc atagacatgg gactaaagga |
| 50761 | ggtgcccata gtcaaccatg ctaggcattg acaaatggct tcctaaaggg gtaatacctg |
| 50821 | tgtacattgc cactagcaat ttgtacactt tcttgattcc tttcactctt gtcaaaactt |
| 50881 | actctttttt aaatttaaaa ttattggcca ggccatggtg gttcatgact gtaatctccc |
| 50941 | agcactttgg gaggctgagg caggtggatc acctgaaatc aggagtttga gaccagcctg |
| 51001 | gccaaacatg gtgaaaccct gtctctacta aaagtagaaa aattaactgg gcatggtggt |
| 51061 | gggtgcttgt aataccagat actcgggagg ctgaggcagg agaatcgttt gaacctggga |
| 51121 | ggtggaggct gtggtaagcc aagatcacac cattgcactc caacacaggg gacagagtga |
| 51181 | gactctgtct caaaaataaa ataaaataaa ataattgtca atattgttgg ttatgaaatg |
| 51241 | ctatctcatt attgtttaaa gaggcatttc ccttgataac tagtgaggtt gaattttgtt |
| 51301 | ttccagatgt gcatgagcca ttggtttttt tctgttatgc attttctatt catatacttt |
| 51361 | gaccacatga tatgtgcctg gtcataaccc atcaaactct tctttctctc agatacttca |
| 51421 | ctttatggaa atctttttca cgtttatccc tcaaacccag aattttgagt gtcatacctg |
| 51481 | ttctaacata aatttgagga aaatgaaggc taattcagaa taaagaacta tataagcaga |
| 51541 | tggacagtgt gttctcctct aaataggggt gctaggataa gaggcggtag gataaatgca |
| 51601 | cagcctcaaa atccaccacc cactaaagac ctcacagtac atgatgacat tagcatgctg |
| 51661 | tgccagcatt tctacctacc acgatgacct ggaatgaagg acaaaagggg caattgttaa |
| 51721 | gtcctgtgcg taaactttgg aagagaacat accttgcttt aaaccattaa gggggcaggc |
| 51781 | aatagattcc tgtacagggt ggcttagcca aaagtggctg gtcttgttct catttatatg |
| 51841 | gtttataatg attctaaatc attctcggag aaaaacagac tcatttcatc tccctttaat |
| 51901 | taggatttct gttactgcaa tattttagtg gcatttatgt caaatgtttt cttttgagaa |
| 51961 | cttctccctt ttactgtctt ttttctttta ttttaaactt ttattttagg ttagggggta |
| 52021 | catgtgaaaa ttggttacat aggtaaactc atgtcaagag ggtttgttgt acggatgatt |
| 52081 | catcacccag ggattaagct cagtactcaa tagttatctt ttctgctcct ctccctcctc |
| 52141 | ctactttcca ccctcaagta gaccccagag tctgttgttt tcttctttgt gttcataagt |
| 52201 | tctcataatt tagctcccac ttatatgtga gaacacgcag tatatgattt tctgttcctg |
| 52261 | cgttagtttg ctgatgataa tagcctccag ctccatccat gttcctgcaa aagccatgat |
| 52321 | cttgttcctt ttaatttact ttttgctatt ctgattagag agtggccatg ctccatgctc |
| 52381 | catatggata ttctttggaa acaaagcatt tttgaaatgg taggattggg gctagtaaaa |
| 52441 | gagaacagaa agaattgtga acagggtctc ctccagtaca gatggttaaa gaacacaaat |
| 52501 | agggaagtgt gatgagtgac ctccatttaa ttgggcgccc aagctcttgg ctgctccagc |
| 52561 | atgggttgcc atcctgactg atcccttggc tcagaaacag atatggtgct atcaggaaag |
| 52621 | caaggccaat atctgaatat tgcagcagag actgctccca tttcagaaag caacccagat |
| 52681 | taaagttgat gattcagttt caataaatgc ttcctttttt ataaaaggca tttaacatca |
| 52741 | ctctttcccc tggtaatatg gaattagctt ttgggatcaa ctggaaaatg tcagagggcg |
| 52801 | attgtaaaag gccacctgct aaccacagga agcbgggctg atacagaatg ccaggttaac |
| 52861 | ttaaggtcga taatggttac ttccttgtca ctttttacat gcatccttgc tctgcagtgg |
| 52921 | gggtcataag aagtaagatg catgcaaggt gaatttctag aagtcagctt ctctgagaag |
| 52981 | tattctctga ccatacattc ctactagtcc ccacatacgc tgctgatctc cccatcttca |
| 53041 | cccccattgt tgaaattgct ccctcattgt aactgttcac tcatctgtct ccaccataaa |
| 53101 | gcttaggctc ctagaaagtc aggaccagag ctagtacagt gccccatgtt cttatggaat |
| 53161 | gattttagtg ccttgagttt ggtgtggtga ccagagctgg tggccaactg tcgtgaggcc |
| 53221 | ccagtccttc tttttgtcat gctttccctc ccagcccctc cttgaccact ctttcacctc |
| 53281 | catctttcta cttatataga gacaaataat aagatgcttg tacaaagggt gtacttgtat |
| 53341 | tatcccattt gtgttgatat tccacaacag caaattaggt ttttttgttt gtttgttttt |
| 53401 | tgatggagtc ttgctctgtt gcccaggctg gagtgcaatg cgtgatctcg gctcactgca |
| 53461 | acctctgcct cccgggttca agtgattctc ctgcctcagc ctcccgagta gctaggacta |
| 53521 | caggcaccca ccaccaagcc cggctaattt ttgtattttt agtactgacg gggtttcacc |
| 53581 | atattggcca ggcbggtctt gaactcctga cctcaggtga tctgcccgcc tcggcctccc |
| 53641 | aaagtgctgg gattacacgt gtgagccact gtgcctggcc tgataaggtt taaagattaa |
| 53701 | ataccatgtc gttaaatttg caaatctctc gaataggaaa atcaggaaca atgacaacat |
| 53761 | tcggagcttc ccagaaggta acaactatgg ggagttttgt gggcatctga gagaagcaca |
| 53821 | cacacagatg gtttgccttt cattggtcca ttcttgccca gaaggcgaca ctaactgaaa |
| 53881 | caaagaagcc tcatatgaga aggacatggg gtcacagcag cttttggggt ggccctgggt |
| 53941 | ccttgatctg gtctttctct ggctcatttt gtattgctca ctttgttact tcacaatcca |
| 54001 | gggcttgtga catttttctt ctctggagtg gaaatgacag agctgcagaa cacaagtttc |
| 54061 | tgattggttc ctatgagtca ggaaagaggg ccagttgaaa ctgggctcac acacacacac |
| 54121 | acacacaaac taggctcaca tgtgttttcc catcagctaa acaagttttc agaagtacag |
| 54181 | aaataactcg ttggggaagg ggacccagga caatgacaat gtttttgatg gtaatgtctg |
| 54241 | cagaagtaag gcaggtttcc tctgtgcctg aaaagatggc accatttgag gagatggcat |
| 54301 | actcgtggtg gaatcttcat taagatgtca aactaagctg taggaaatca actctagaaa |
| 54361 | acagctctaa tgtgagaaaa catatatcca gttttataga gcaagagctg tgatcatggt |
| 54421 | gacatttaac aactgtatta gttggccaag agggtaaaaa tatacttgac ctcttagagc |
| 54481 | accataaata ctctcagctt gtgggccaac tgtgtcatgg tcttttttct agcccctcct |
| 54541 | ctttctccct tccttcttgt ctctctcctc ctctctcttc cctccccttt ctcctttctg |
| 54601 | accctctttt ctcttctcta tcttctcgaa ccttcccttc ctcctctcct ttaggtgctc |
| 54661 | agcacctctt tgattcaata aacatttacg gagctccttc ttgtgccaac gactgtacac |
| 54721 | agagcbggga tgtcaagatg aatcagttac atttcctgcc caatgccaag ggatggcttg |
| 54781 | atgggttttg accagcccct ccctggactc ccaatttctt tttttttttt ttcttttttt |
| 54841 | tttttagacg gagtcttgct ctgttgccag gctggagtgc agtggcacga tctcggctca |
| 54901 | ctgcagtctc tgtctccctc ccaacttcaa gcgattctcc tgctcagcct ctcgagtatc |
| 54961 | tgggattgca ggcatgcgcc accacaccca gctaattttt ttgtattttt agtagagaca |
| 55021 | gggtttcacc atgttggcca gggtggtctg gatctcctga cctcgtgatc cacccgcctt |
| 55081 | ggcttcccaa agtgctggga atacagtcat gagccaccgc gcccggtgcc ctggactccc |
| 55141 | aatttctacc tcctggaacg tgctttactc accagccttg gtgttattct gcaatatggc |
| 55201 | caactgggat ttttttcaat cttacagaaa ttattctcgg aaatgtttgc tatttttttt |
| 55261 | taatgaagct acagcataca atttaaggat aaataatgta cttactctgc agctattgtt |
| 55321 | tcaagtcaaa tccgctgatt actcctccaa aattcttttc ttaataaaat ctctgaccct |
| 55381 | ttcctcttcc tgttagaact tctggagcta ccattgttcc tcctcttggg ctgctcataa |
| 55441 | cctaggggag tcacagtgaa attacttgct ttaaaattct ttaatcactc tgcgagttgt |
| 55501 | taggaaaagc tgacacatct gatttggaaa ctcccactcc agtggactgt tgtgcctcag |
| 55561 | cacacaggga cgggtggagc aaaggaacaa gaagccaaaa actctcaggg cacttactat |
| 55621 | gattgtgtaa aagagagact catcaattaa cacaggtact ggcaagtgca cttcataatg |
| 55681 | cctccatttc tagacagatc aaaaacagtg tgccctgtca ataaatgctg agtttctgta |
| 55741 | gcagcctgat tgagatcagc taacctttag gccaaaagcg ggattcttcc ttgctgaagc |
| 55801 | ttttggcaaa gcatattgag cttcatgcca gggattagat taactcttgc aaaactggtt |
| 55861 | caccaggaac aatgactcag tgtttttttt ttagtatccg gcatattgtg tggagcagct |
| 55921 | ataaatatat ttacaagctg gagtttcaag ggaggggagt aatagcttgc tgaaaaacat |
| 55981 | gccaactgag ttatgggtct tcacgcagcc agcatgctgt gttttgggct ctgcctcttg |
| 56041 | taatttttag aaattaatta gtttattctt tatttatatt tatttattta tttattttca |
| 56101 | gatgggatct tactctgttg cccaggctgg agtgcagtgg tgcgatctcg gctctctgca |
| 56161 | acctccgcct cccaggttca agtgattctc ctgcctcggc ctcctgagta gctgggattt |
| 56221 | caggtatgcc tcaccatgcc tggctgattt ttgtattttt agtagaggca gggtttcacc |
| 56281 | atgttggtca ggctggactt gaactcctga cctcaagtga tccacctaag ggtactggga |
| 56341 | ttacaggcat gaaccactgc acccggcctg ttggttgtaa ttttattttc ctcctcaagg |
| 56401 | actttgagca cattatcttc tctttaataa cttgtttcca ccctcctttg tgcacgcgcg |
| 56461 | cacgcgtgtg tgtgtgtgtg tgtgtgtgtg tgtgtgtgtg tgtgtatttt ctgatctccc |
| 56521 | tacgggggca gagagtctca agcaggtatg tccatgttat taacatactg tctgcttatt |
| 56581 | aactaactgc accaatgatg aaagccaact gacaaacaag tgatgctctt atccctcctt |
| 56641 | cgcaagcaat gaatctgaaa gccaagagaa gttttccttt caacaggaag tgttttggag |
| 56701 | tccgaacaac tctgcattta gacagtgcag cttttagtta cagatcttgg caatggggca |
| 56761 | ggcagaggga gcggcaacta cagactttgc cgtaggactg ttttctatgg agtgtgtgtg |
| 56821 | ctctgacgag ctagtgacag gagggaggtt acaaaagcat ttactgaaat aaggatttct |
| 56881 | aatagaggag ctttttaaaa gtattaaata tgctaatgtg cctagggcat agtcaacaaa |
| 56941 | gagttataat acatgtcatt tttcatattt atcaaggaaa ccatgtcacc cgcagccttt |
| 57001 | ctcaatttct ggcattctga gaaacacact gtagtggtgc ctgagggtct ggggaaagaa |
| 57061 | gaatagaatg aatggggcat ctcagaatcg taaactcccc cagttgtagt tcctttcgat |
| 57121 | gttggtcgtt ggatgaattt ccagtttcta ctattgtggt tggattgggg agagtagctc |
| 57181 | aaattgggaa ttgctttttg aggatctagg gcttctggaa ttctcccagt ttctttttac |
| 57241 | ctctttatgc tatcttgtct actttgaaaa atcagtagca tccatttgat tgcagagctg |
| 57301 | aatctttcta tacagtgagg agttgtaatc acattactta taacctgctt atttaacttt |
| 57361 | ttaaaggtgc aagtcattgt aacctaagta tttactcaca ctgatcctta atatactccc |
| 57421 | ctttcttatc tgcaagcttc tttctctggt ttctcctaac tctgttactg ctcatgagtt |
| 57481 | taaaactttg tcttctcagt tcctggcttc acctgtttgg tctctgctct ccaggactct |
| 57541 | gccttggaaa tctgactcac acttctatat gtccctgggg ctcaacttcg ggcctggcgc |
| 57601 | cagaatcacc caggctccaa gcaagccttg tagactccac tcagtccttt gactcaagga |
| 57661 | aatctccact tctaaatggc tctccggttg attctgatgc cagtccaggg ttgagaacca |
| 57721 | ccgctttagc ttctagacac acagccccct cccctttttc ctggagcccc tcttgggtca |
| 57781 | tgattctatt ttccctattt ctgtactcag aagggataaa aatggaagtg tatgtgaagt |
| 57841 | tgctactacg tcccaggtgc tttaaatatg ttattttatt caatcttcac aacagtctta |
| 57901 | tgcagtctct atttttattt taagaatgag gaaaacaata cttgggtgca gtggcttatg |
| 57961 | tttgtaatcc cagcactttg ggaggccaag gtgggtagat cacttgagcc caggagttca |
| 58021 | agaccagcct gggcaacatg gcataaccct gtctctacca acaatacgaa aattagccag |
| 58081 | tctcataacc tggtctataa ataaataaat agataaaaat ttaaaaataa aataatttaa |
| 58141 | aaagaaaaga atgaggaaaa caagattcag agagccttgg tcatcttccc aaaggtgcac |
| 58201 | aattaagaaa tggctaagca ggggttctga ctcagatctg tcagcatcta cagctttgct |
| 58261 | atttaaaaga gcgtggtccg tggactagca gaatcagtgt cacctgggat cttggtagaa |
| 58321 | acacaaatac ttgagtgcca tctcagacgt actgaatcag tttcttcagg ggtagggtcc |
| 58381 | aggaatatgc attttatgaa ggcctctaaa tgtttctcaa agtttaagaa gcatggggaa |
| 58441 | ctatatcttt tcctactata tagtcttatc tctttccttg tttctttact ccaaagtatt |
| 58501 | gccttatttc tttcccagaa acctcactat cagctcactg tgcagcctta ctcatatctt |
| 58561 | cctcaaccag cagttttatt acacacaccc ttctcatttc ctcacattgc tcatggtatc |
| 58621 | tgactgagta cagggatcca acctggcttt gggttttgca ctgtcttgcc tcagtctctt |
| 58681 | aatttcttcc tatgtacatt ttaagatatt gaagacacta acttccaaac ctcttctcta |
| 58741 | aatctgacag tgaagcagtg tgtgtgtgtg tgtgtgtgtg tgcatgccag tgcatacacc |
| 58801 | acacatacaa gcacatacac agagttaagt ttggtcacat ttacttcatt aattgatata |
| 58861 | taccacaact gagaaaaact tactggcatt ctgctccaag cttgaattcc cagacgaaaa |
| 58921 | acaaacaagc aaacaaacaa ctcctcctta cacaaaaata tctagtggcc ttggaaaatt |
| 58981 | ccatttaaca ttaaattgtg tctcttcaaa gtgaagcagg gtgggcagat ttttgaacat |
| 59041 | gaatctactg ataacacaac acctcttcaa aactagaatc tcattcaggg ttaaatgatg |
| 59101 | tccaagtcaa acctgagatg ctagcatgat gccccatcct cagtcagagg tttcagggtg |
| 59161 | gcaaacaact tttgctcact ctcctctgcc tctctctata tttgcagaaa gtccagcttt |
| 59221 | cactgcaaaa gttcgataac tctgtaaaac agtttgatcc taacttcaaa agaattttta |
| 59281 | tgctatttgg aatacataaa aaatgaattt attccaatac tttagcccca taaataatgc |
| 59341 | ataatgattg gtgaaagatt agcattttgg agttcaagta cttaaagctt tcttggatgg |
| 59401 | ataatgcatc acccttaact agcataaggg gaaatagaag gttgacaagg aaaacttaat |
| 59461 | ttagggttct ttatttattt ttctctagtt atgtttacct tcccaggttg ttttattaat |
| 59521 | gccacttttc acaaggatat ttcatgaata aatatcaggt tgtatctctg gccatctgtg |
| 59581 | atgatcacgt ttttattttt aatgagttgc tcatggatta tatcctaact ggaattgcag |
| 59641 | tcagtatatt gagatgcatt gactccattt ctgtctttca ttcttctttc tcaatgtatt |
| 59701 | ctcactggat tagcactctt agccctgagg actcttgggc cagttttatt actaaaagaa |
| 59761 | gaattacagt tttgctacac agtgaccttg caagaagtat cagcacagct caatttcaaa |
| 59821 | ttctcctcaa atatcaaata tgttcttggt atattttgct tagcagttta ttgccttctc |
| 59881 | atctccactg tttttcctga gtaacagctc agaaatctat aaataaaact taataatggg |
| 59941 | gagtgactca aaagtctggt tatttttatt agtaaactat tttaggggtg aacacttcac |
| 60001 | attttacatt ctcatgctcc acagtgctga aaatagtctg aatttttttt gtgtgttagg |
| 60061 | ttgatgagaa tatttttgag atgactagca gaaaacagaa tcattaaaac agtgctatca |
| 60121 | gttttcatgt tgaataactt tacaggaaat gatagcatct ttttttcttt ttttgagacg |
| 60181 | gagtttcgct cttgttgctc aggatgaagt gcaatggcgc gatctcggct caccgcaacc |
| 60241 | tccgcctcct gggttcaagc gattcttctg cttcagcctc ccgagtagct gggattacag |
| 60301 | gcatgcgcca ccatgcctgg ctaattttgt acttttagtg gagatggggt ttctccatct |
| 60361 | tggtcaggct ggtctctaat tcccgacctc aggtgatcca cccgcctcag tctcccaaag |
| 60421 | tgctgggatt acaggcgtga gccactgtgc tcagccgata gcatcttaac aataaacatg |
| 60481 | caaagatttg taaatgttgg caaacagcaa gaaaaacata tttagaaaat tgtgctatgc |
| 60541 | tttaatgtcc tgtctgtacg ataatttact tagctcccta ccttcccccc agcccaccag |
| 60601 | aatgtttaaa ctgaaattta aagcacagtt gatcttggct tggataggca gcctgcatat |
| 60661 | taactgagga tttagttagt atccaggagc agatctactt ctcaaagtga gattcacata |
| 60721 | gcccccttgg aagctttcaa atagattgac tagcctttta aaattcctct tctccccttt |
| 60781 | cttattgccc ccgccttgtc tagctgtatg ctaacttgct gcatagaatc ctgaatttct |
| 60841 | ggatttctac atttctagct caatgaatgg ggtaaatcaa aacttaataa cactcttgat |
| 60901 | tttgaaaagc ttcagtgctt catgtaagac tttttgagaa aagatcattt tcatttattt |
| 60961 | ctgttttatt tctagcttaa tgattaaatg taagcbgttc aatacctttt tcaatatccc |
| 61021 | acttgttaaa cccacactaa acctcagaaa tattgagtca gtgatctaaa tttccattca |
| 61081 | aaatttccac aaagcagaag cataaatgtt ttcattgtca ttacaaataa acagacaggg |
| 61141 | ctgggcgcag tggttcatgc ctgtaatccc agcagtttgg gaagctgagg taggcggatc |
| 61201 | acttgaggtc aggagtttga gaccagcctg gccaacatgg tgaaacactg tctctactaa |
| 61261 | aaatacaaaa aaattagctg gattggtggt gtgtgcctgt gatcccagct actcaggagg |
| 61321 | ctgaggtagg agaatcactt gaacctggga ggcggaggtt gcaatgagct gagattgtgc |
| 61381 | cactgcactc cagcctgggt gacagagtga gacttcatct caaaaaacaa aaacaaaaac |
| 61441 | aaaaacaacc ccttcccctc cacgaaagaa aaccccaaat aaacagacaa atgaaagcaa |
| 61501 | tgaaaacagg aaaataattt tgacacctac ttctgggatg ttatgttatg ctttgcattg |
| 61561 | gttctattta ttagacatgt tcccatcttt attatttaag agcagataaa ataacctcac |
| 61621 | tacattaatc tcttttgctc tgcctctttc catatgattc ttcactagca gttcccaaaa |
| 61681 | caaaaaaatt gtgcaccaaa atcccaactg agactcaatt gtttgctgac tcaacaactc |
| 61741 | taatgagaaa tcttatacaa gagcttttgt ttcaaaagga agtgccagga aaattttgct |
| 61801 | tccctcaagc aatggcatgt tttctttttc tggacagtga gaaccatgta attaaacata |
| 61861 | ttttcctttg tgctttggct gtcaggaaac tcagagccaa acttgtagcc caagttttat |
| 61921 | ggctatgtaa gacattatgg cccatatatc tggactcttc ctttctcctt ggtattgatc |
| 61981 | ttcagtcttg gctttagttt acaaaatatg ccattataaa aaataacagt atctgtaggc |
| 62041 | tgtctgaaat tattatggaa aaagtagtgt acaaataaat gaataagtca attgtttgaa |
| 62101 | aaacaatgca tttgtatcag aaataacttt gtgagtggtc ttcaggttcc tagtctattt |
| 62161 | cattttgata tatatttctt gtgggtttac cacgtgccag acaaagatgt tcctggcagg |
| 62221 | ggggttaata atgttaacag tactcagtct ttctagtgcc ttacaggcta tagaaggaga |
| 62281 | aagaaataca aaacaaacta aaataggtat tcaattgcaa caaaagcaac ttgatgtagg |
| 62341 | ggtacagggg aaggaataat tcattctaca ggcctttaaa agataaagag gtatttcaaa |
| 62401 | ggcaaacaat ggagagaaga tcattctaag ctaaggaggt tgcatgaaga aagcataatg |
| 62461 | tcactacttt tttttttttt tttgagacag ggtctggctc tgttacccag gctgtagtgc |
| 62521 | agtgatgaga tcacaggtca ctgcaacctc caccttcagg gctcaaacca tccttccaca |
| 62581 | tcaacctccc aagtagctgg gactacagct gcatgccacc atacccagat aatttctttt |
| 62641 | attttttgtg gaaacagggt tttgccatgt tgctcaggct ggtcttgaac tcctgagctc |
| 62701 | aagtgatctg cccaccttgg cctcccaagg tgttgagatt acaggcatga gccaccgcac |
| 62761 | ccagcataat gtcatcaaat tgaagtgaga aatgggaatg tcactaccaa ccataagtaa |
| 62821 | taaacaatag attatcatta actttgctcc tagagaaaga caagtttatt tagaggtgag |
| 62881 | gcgagtagaa tttttttaag ggaacttctg ggtaatttaa caccatgatc cttctcgaat |
| 62941 | gccttacaac gtaaaaatgt agttctcctt tttcttttct tttctttttt tttttttttt |
| 63001 | ttgagacagg gtctcgcttc gttgcccagg ctggagtgca gtgacacaat cttggctcac |
| 63061 | tgcatcctcc gccgcctggg ttcaagtgat tctcctacgt cagcctcctg agtagctggg |
| 63121 | attacaggcg tgcactacca cgcctggcta atttttgaat ttttagtaga gatgaggttt |
| 63181 | tgccatgttg gccaggctgg tcttaaactc ctgacctcaa gtgatctgca cacctcgacc |
| 63241 | tcccaaagtg ctgggattac aggtgtaagc caccatgcct ggccattttt cttgataaag |
| 63301 | gggtgtcatt ggggcttctc ttactcctgt cactcatcat gggtgccatg tctttttttt |
| 63361 | ttttttttga gatggagtct tgctctgtcg cccaggctgg agtgcagtgg cgcgatcttg |
| 63421 | gctcactgca agctccacct cctgggttca cgccattctc cggccgcagc ctcctgagta |
| 63481 | gcbgggacca caggtgcctg ccaccacgcc ctgctaattt tttgtacttt tagtagagac |
| 63541 | ggggtttcag cgtgttagcc aggatggtct caatctcctg acctcgtgat ctgcccgcct |
| 63601 | cagcctccca aagtgctggg attacaggcg ggagccactg cgcctggcct gggtgccatg |
| 63661 | tcttaattga caaccacaat gaagagagga aggaaagagg aaagaataag acaatacaag |
| 63721 | aagaaaaggg aaggaaaagc caatgacaga cattaactgg attttcccac aaagagaggt |
| 63781 | catgaggatc aagagcatac agaagtttgc aaaataaaga gtttctctgg cttggagttg |
| 63841 | accaaaataa gagaaaggtg aagcgagtat aatgtacgga gacttctcct gggagaagtt |
| 63901 | gtcagtggag aagttattgg gtcatatagt gatggtgtgc agataggacc tggtggtgag |
| 63961 | ttgacgagga gccattgcca ttcagccatc aagaatcatg atgtgtgttg tgtaggaatg |
| 64021 | gagaggtgag tgtggagtgg atggggcgta gatggagaag caggaggatt cgtcatgcac |
| 64081 | cctgaggctt gccagtattg atgtcagact tcctccgacc gtgttgccac cctggactgt |
| 64141 | ttgactttgg tagctatttt aaaacagcaa gaagagctgc ttgagaagaa cctgggggag |
| 64201 | atttcacaac cagcagctgc atcgaatctc cctggatgtg tgcttttgga aacaatttac |
| 64261 | acaagggctg atttcaacat gcactaatat atacagttta gctggcattt tatatggaaa |
| 64321 | ctttaataaa atggttctaa ttagtgctta atttacatag attagagagt tctacaggcc |
| 64381 | cacacagtag ggcttgggga ttttatgtca tttgatggag atgccagttt gattcagata |
| 64441 | aagaaccaat tttagggaat actgctgaag tttgcccgac acaaatgaag gagttgtagc |
| 64501 | ttgcatttct tttacccact cttgttcagt ggcttgaact agctttctgt ctcttccaca |
| 64561 | agatttagga caagatggat ttctgtgtca gcatgtagta ggagagcttt gattttctag |
| 64621 | ttctgtcctg tgtggatctg tatgtagctc agattccccc acaatctagg tcagagaagc |
| 64681 | tgctagcctt ggtgcaaagt tttcaaaaag gcttctattc agagagatga ataaggaaaa |
| 64741 | actcacaccc tacgtgcgaa ggttgcttaa tgagaggtgt gagatggagc tcagttgcca |
| 64801 | cttatctctg tagttgggta ccgttgtgca gtctgtgcac tgcccagcca tttgcagtga |
| 64861 | ccccaaagag gatcatctgg tcatcttgcg gggagagact gtgagttcct gccatgtcac |
| 64921 | ttggtataac atgagaaaac tcaaaactct aggcagatct ttgcacctgc cctacttttc |
| 64981 | tacctgctct cacaatcttc ttgagggtga ccagagtcca agtaactaag tgtaattcaa |
| 65041 | tgtggtgaat gatatgattg ctacacagga gtatctatta aggctttcaa aatgtaaaga |
| 65101 | ggaagtgact cattcttcct ggtggtggtg gttgcatcaa ttggtgtagt ctattgcctc |
| 65161 | tctcccatca acaagggaca tttggcaaag tctggagtgt gtcaactgtg gggtggtggt |
| 65221 | actaccggca tctagtggat agaggtcagg gatgctgctg aacattttac aatgcccagg |
| 65281 | acagccctcc cacaataaat tatctggccc aaaatatcag tagtgctgcc attgagaaat |
| 65341 | ctggttatgt aacagataac tttttttttt tttttgacat ggagtttcac tcttgttgcc |
| 65401 | caggctggag tgcaatggct tgatctcgac tcactgcaac ctctgcctcc tgggttcaag |
| 65461 | tgattctcct gcctcagcct cctgagtagc tgggattaca ggcatgcgcc accacgccca |
| 65521 | gctaattttg tatttttaat agagacgagg ttttaccatg ttggccgggc tggtcttgaa |
| 65581 | ctcctgacct cagatgatcc acccacctcg gtctcccaaa gtgctgggat tacaggcatg |
| 65641 | agccactgtg cccagccaac agataacttt ttaaattctc agcbgtttaa cccaacaaat |
| 65701 | aattattttc ttcctcaagc tgtatgtcca gcatgggttg gcaacatagc cctgtttttc |
| 65761 | ctagtccctt caagaagtct attgatggaa gatgcatttt tatgtgggct tctaccacca |
| 65821 | ctatgagagg gggaaggaaa tttgttggat tgtaccctga attttaaaaa gcttctgccc |
| 65881 | agaattgaca tatattcttt ccaattgcat tttattggcc acaatccatc atatgaccat |
| 65941 | gcctgaattc agagggagta ggtggagaat acatttttaa tttttaattt tttttttttt |
| 66001 | tttgagacag agcctcactg tcttgcccag gctggagtgc agtggcgcca tctcggctca |
| 66061 | ctgcaacctt tgcttcccag gtttaagtga ttctcctgcc tcagcctcac aaatagccgg |
| 66121 | aattacaggc atgcaccccc atgcctggct aaggtttttc atatttttag tagaaatggg |
| 66181 | gtgtcaccat gttggccagg ctggtctcaa actcctggcc tcaagtgacc catcctcctc |
| 66241 | agccttccaa agtgctggga ttacaggtgt gagccattgt gcccagagag agtgcatttt |
| 66301 | tgtcttgtac ccagaaagag gagagagtga gaataatcat gaactaccct aatgactatc |
| 66361 | atgctgatgg taatggtggt tgtaggatgg tgtgagaatt taaagacggc ttcactcctg |
| 66421 | tcactttgct tacttactgc tgtataacaa actgccccaa acttcaggga tgaagctaac |
| 66481 | aaaaaaatca tttaatttgc tcatgaagtt gcaatttgga tagggctgtg tagaacagct |
| 66541 | cctctctata ccatggggca tcagttagga cagctcaaaa cctgggagta actcaaaggc |
| 66601 | tgggggctat aatcatctga atgcttgctc actcctgtgc tctcatgtca ggcagtggat |
| 66661 | gctggctgta gacagagacc tcagcbgtgg ctgtcagctt gaccacctac tcccagcctc |
| 66721 | tacatgtggc tgtttggctc ccttacagta tggtggctgg gttccaaggc agaaagtaaa |
| 66781 | tgctgccagt ttcttaaagt ctgtctgcaa attggcacag cattctttct accatattct |
| 66841 | attcatcaag gagttgtaga ggccaatttt aaggggaaga aaaatagacc ctatgtttca |
| 66901 | atagcaggaa ggtcaaagaa tgtggaggcc ccagaaaact gcttcccagg taagtgacag |
| 66961 | gatagaaaaa caagattttt tttttttttt ttgagacagg gttttgctct tgttgcccag |
| 67021 | gctggagtgc aatggcgtga tctcggctca ccacgacctc tgcctcctgg gttcaagtga |
| 67081 | ttctcctgcc tcagcctccc gagtagctgg gattacaggc atgcgccacc cagttaattt |
| 67141 | tgtactttta gtagagacag ggtttctcca tgttggtcag gcbggtcttg aactcccaac |
| 67201 | ctcaggtgat ccgcctgcct tggcttccca aagtgctggg attacaggtg tgagccacca |
| 67261 | tgccaggcca gaaaaacaag acttctttag gtggagtttg gggaatgagc tttctggaca |
| 67321 | agtaaacggc atgcatcaag gcacagaaac atcagagctg catttgaata aattctccta |
| 67381 | gctggtctta cctcctagct acttacttct actgttgaca tcaaccttat aaacttgcta |
| 67441 | gaggctcagt gtggggaaac aaacaaacaa agcctcatga aacgttttga tccaattaga |
| 67501 | aaatgtctat taaatacatt gtgtttcaca aatgtgaact attaatacaa tctgggtttg |
| 67561 | ttccgattta attgtctaaa attatacata attcatcttg ccaacaaatg aaattattga |
| 67621 | aaaattaaaa atatcaccac caattttttc tattaaatgt atatttttgt aatgatagct |
| 67681 | taagtttcat ctcagtttga gatttagtac actgtggcat tcactctggt tggggttcat |
| 67741 | ttggctctga gcttcaaggt tcaatttaga cttcaaagca tgtcggactt gacctgaggc |
| 67801 | acgtttttaa caatcaggtg cagtttgtaa ggttatgggt tgaggaatag cataaatggg |
| 67861 | ccatcctttt tctgattttg agaagagaat gactactaat acccaggtgt gttcttgtct |
| 67921 | ttcttgagtc aattctaaca gcattggctg tgggttataa aaccataaaa ttttacagcc |
| 67981 | aaaaacaact ttaaaggtcg tttagatgga acttcttcat tttgcagatg aggaaactga |
| 68041 | gaatcagaga caaagtgacc tcagggcatt acaacttact attactatat tgaaagagga |
| 68101 | agggaagctg gtgcaagttg agggacccac tgatgaactg cagggtatcc aatgttgccc |
| 68161 | ctgtgtttgg gctgagggag aagcagcttc ttagcttctg ctatgctgac ttatcttgtg |
| 68221 | atctctgtcc cagcccttgg ctgcctctcc tccttgtccc caggcctgca ccattccatc |
| 68281 | tgcctcctga ttattcactg acagctgcct tttccctcac cctttgttct cagtttttaa |
| 68341 | aaatccaatg gggagaagct tggattcaaa tgatagcatt ttcagctcat gaaaaattct |
| 68401 | ataacaagtg tatttgaccg tttgatctct ggcttctccc acacacttgc cctttatact |
| 68461 | ctgacagcca taagcttcat ttccttgaag cagattgcaa tttcaatgga aaggaaataa |
| 68521 | ttgtgtagct ttcaagctga gttcagttct aaaaaggact gagcaaagct caatcctggg |
| 68581 | ctattgtaga atcttagtca ctgaatcagg cagtgaaaga gctctctcca agcttcatgg |
| 68641 | ttatgatctt gaaaaacacc agagctaggt tcaaattcca gccataccat ttcctaactg |
| 68701 | tgtgattttg gcaaatcaca caaatactta aaattctttc gactcggttt cctcttctgt |
| 68761 | aaaatgggaa cactaattaa tgctcacctc aaaaggttgt tcattcattc aacacatatt |
| 68821 | cgttgggtgc ctcctgtgtg tcaaactgtt tcagtccagt gaggaagatg gacatgaatc |
| 68881 | caagagtcac caaaaaaatg taaagtggca cctgtgatga gtcacaaagg ggaggtatat |
| 68941 | gagaaagtgt gtgacagtat ctaacaggtg agggcattat ataatttatt gttgcaaaca |
| 69001 | ggacattttt gagcatgtaa gagggtgtgt taattgtcct ggaacaacag gcataaatca |
| 69061 | ggactttctg ggcaaactca ggccctaccc cactcttacc tacccttagt ataagaggga |
| 69121 | aggttgggaa aggctttcct ggggaaggga agaagaaact gagatccgcg gaataagtga |
| 69181 | ggattcctag gcaaaaagag gaagacagag tggtttaggc caagagagca aacagtggtg |
| 69241 | caagactcta aggcaggaca aagcatggag cctgcagaga acagacagaa ggtcagtgtg |
| 69301 | atgaagatgg gaggggtgcg tggctttaaa cacaggcccc ttgcttgttg gtttgccctg |
| 69361 | taggtgttaa gaaatgaggc tatatcaagg tgaattttaa gtagaggtgg cacctctact |
| 69421 | taagaccaga cttgcagctt taaacatcag tctggctgca aggcagaatg gattagcatt |
| 69481 | gagtagtagt tctggccttg gctttccaga ggaaacttct aaacaatatc aaagccttgg |
| 69541 | tgtcacccac agagatcctg atttaattag tttaggttgg ctcccagtag gttataaagt |
| 69601 | gtgtcaggat tgagattcac tgtagaagga agtgtgaata tggagaagaa taattacaag |
| 69661 | gctattgcag tagcccgggt aagaagtgat ggaataggtt catggcagtg ggtttctgaa |
| 69721 | gcagtggttc tcaaactgta gtggatttga gtatcacctg gaagtcttat ttatttatta |
| 69781 | gagatggtct cacactgttg cgtaggctag agtgcagtgg tataatcata gctcactgca |
| 69841 | accttgatca gccttcatct cctaggctca agcaatcctg ccacttcagc ttcctgagta |
| 69901 | gcbgggacta caggcatgga ccaccatggc tatttgtttg tttgttttta atagagacag |
| 69961 | ggtctcactc tgttgcccag gcbggtctca aattcctggg ctaaagcaag cctctctcct |
| 70021 | tggcctccca aagtgctggg attatagcca ctgcaccttg gcacggaaac cttgttaaaa |
| 70081 | tgcagatatc tgggtatcat tgatttagta ggtcgtggat ggggcctgag aatttgcatt |
| 70141 | tctgacaaat tacctggagg cgctagttgc tagtttagag atcacactta gcatctagtg |
| 70201 | ggtagtggtc agggatgctg gtgaatatca tacaatacac agaacagccc ttttgctgat |
| 70261 | cactgatcga gcaaaaaaac catctgatgt ggtagataac atcaacagga tttgatcagc |
| 70321 | agggtaaagg acaactccag gactcttaca gttttctgaa tttcacaact aaatgacgag |
| 70381 | tttcactatt cattgacatt caggagacag ccctacagac ctgagaagat ggtgaagtca |
| 70441 | aagctacaca tatatttgag ggttaccttt gaaacagcta agaggataca tcaagcagga |
| 70501 | acatatatgt ggaacctgga agggaagatc attacagata taaacttggg gatcattaaa |
| 70561 | gccaggaact tatcaatggc atcagtcagt tctcttttct tttactctta tcattggtgt |
| 70621 | caaagctctg gcctcttttt gttggttcca ctcaggtgcc gtgatcctcc agcctcagca |
| 70681 | ccttgcbgtg agctctcctt gggaggctgc ctctccctcc tccttcagaa tttaccccct |
| 70741 | acttctcctt tgggtcccac ctctcaggct tggtcatgtg tggcattagc aagcaggtgt |
| 70801 | gcgtgtttcc ttctgaagca caaatcaaag ccatggttat gtatctgtgg gattatttgc |
| 70861 | taaatggcca cctctcctgc tagattctaa gttgcctgca gtgactggag aacatcccta |
| 70921 | ggtatcagat gctcaatgtc ttacacttat ggaaccgtca aagacagctg ttaaatgtcc |
| 70981 | aatgggtcag ttagggagat ggtggttgtt aaaactgtga tgagttctca ggaagaggga |
| 71041 | gaagcagtta cctttgtgaa gcagttgttg gtatttactt agtaatgaga ttaaatttcc |
| 71101 | taggacagtg ggtgtgtgaa ccagcaatag cgccatctgc tggaagtaag tgatacaaca |
| 71161 | actattatct tgactaggct cagggcbgtt aaaacagtat tgctctggga gaaaagaatc |
| 71221 | atttttttta aggttaaaaa tgtgagtaaa attctttaga gtgaagatag aatttctttt |
| 71281 | gaaatggttg gaaaaattgg ataattattg aaaatagtgt tcagttttca aagaggagag |
| 71341 | aaaccttcaa gtcactgtaa ttaagagaag ttttattgaa agaacacatg gaataaggaa |
| 71401 | gttagatatc tccacccaaa accagcattt cagaaaacag aaacaggcaa aaatctggcg |
| 71461 | gagtgtggtg gctcatgcct gcaatcccag ccctttggga ggccatggtg gaaggatcgc |
| 71521 | ttgaagccag gagtttaaga atagcctggg caacatagta agatccccat tttctttttt |
| 71581 | cttttctttt cttttctttt tttcttttct tttctgagac agagtgttgc tccttttgcc |
| 71641 | caggctggag cgcaatggca tgatctcagc tcaccacaac ctcccgggtt caagaaattc |
| 71701 | tcctgccttg gcctcctgag tagcbgggat tacaggcatg caccaccaca cctggctaat |
| 71761 | ttcgtatttt tagtagagac gtggtttctc catgttggtc aggctggtct tgaacgcccg |
| 71821 | atctcaggtg atctgcccac ctcggcctcc caaagtgctg ggattacagg catgagcccc |
| 71881 | cgtgcccagc cccaagaccc ccatttctat tttaaaaaaa aaaaagaaga agaagaagga |
| 71941 | aaagaaaaga aaaatggaaa caggcgaaaa cctaggcttc tcaaagactg aagggtattt |
| 72001 | tggaactgac tggatattgc tcatctctgg ctggttgtgt tgcagcctcg ttggtggcaa |
| 72061 | gtgcagaccc tcagtcagtg acctcctttg ttgctcttcc atcaaagggc ccccttctcc |
| 72121 | tgcccaggca tggtgttact aatatggcga tggtaggggc aggggctgca tctatgacgg |
| 72181 | ggagaggtat gagagtatac tcatcattct gctgttgtct ttgttagttt gtttctaatt |
| 72241 | tctattgttg gggagaaaga taaattcttc cctaacctct tgggatcttc acctgggtct |
| 72301 | aagaattaaa tcactgtaag acaggttaac aggagaaaaa tatatgagtt ttattgattt |
| 72361 | ttacatgtac gcggagaccc tcatgagaca gcagaagacc tgaagaaatg gacaaagcag |
| 72421 | aaagctctaa taccttttag acagagaaac cataaattca tgaagagctg acaagacaaa |
| 72481 | ggggtttggg ccagtggcag taaattgtgg gaattcacta gggaggtgta aagatagagg |
| 72541 | aagataaggg atagtttaga aagtttattt gtacagctcc attgcagcat caactcccag |
| 72601 | tcaatggtga taagagttat tttcttattc tggtacaggg agggcaactt tcttaaataa |
| 72661 | atctttttgg cttacgacag gtagaagagg gcagatcaca tagccctttc cggcatctgc |
| 72721 | tgtttctcag gtgactttag ctcaaaataa tcaacatgcc acatcagcaa attttggggt |
| 72781 | gacatggcct gtttcgctat gataatggga aagaaatcag actttttaac tttgaattag |
| 72841 | aaaacacaaa ctttgactat gtcccacaat ttatgtgact gatttcatat tctatcacat |
| 72901 | ctattttata ttctctcata ttctcctcat gaattttccc ctagaatgtt gggggaattt |
| 72961 | tgaaatgact tggggggcat gctacaattc gaaaaggaga gagacatact ctccaattct |
| 73021 | ctccctgcct gcctcacaat gtgcagctct cctctgcttc ttcttcttct tttttttttt |
| 73081 | tttgagacag cgtctcactc tgtcacccag gcttgagtgc agtggcgcaa tcttggctca |
| 73141 | ctgcaagctc cgcctcccag gttcaagtga ttcttctgcc tcagccttcc gagtaggtgg |
| 73201 | tactagaggt gtgtgccacc acgcccagct aatttttgta tttttagtag agacggggtt |
| 73261 | tctttatgtt gaccaggcta gtctcgaact cctgacctca ggtgatctgc ccacctcagc |
| 73321 | ctcccaaaat gctggaatta caggtgtgag ccaacatgcc tggcctcctc tgcttctgat |
| 73381 | tcaactgctg ctaccgatag acttactgaa ggatttgaag ccaaatggta ttaattttgg |
| 73441 | tcagttactt ccctgtatct ggtgtcctca ctagacagaa cttctgtgta tggctacttc |
| 73501 | atagaccccg accagcctac atattgtttg ctctaaggtc tagtgccctc tcttatttca |
| 73561 | ctaagataca gccactgttg gtgggggagt cacataacat ggaacataat cactgtatca |
| 73621 | gttcaggtgc tcttgattca agtggattta attatgaggg aatttattcc ttacataatt |
| 73681 | actaagtcta gcattagagt ggcctgcaga tgagggttga tccagtggct cagtgatggc |
| 73741 | cagaacgctg tttacttttt ccattctgct atctatgggg ttggcttcat cctgaggttg |
| 73801 | ttttcctttc tgtcacaggt tttacatcaa tggggtaaac tagtttacat tgtggtaaca |
| 73861 | agcaactctc aacttttttt tttttttttt tttttagact gaatcttgct ctgttgccca |
| 73921 | ggctggagtg cagtggtaca gtcttggctc actgcaactt ccgcctcctg ggctcaagtg |
| 73981 | attctcctgc ttgagcttcc tgagtagctg ggattacagg catgcaccac cacgctggct |
| 74041 | aattttcgta tttttagtag agatggggtt tctttttttt ttttttttct ttttgagaca |
| 74101 | gaatcttgct ctgtcgccca ggctggagtg cagtggcgtg atctcggctc actgcaacct |
| 74161 | ctgcctcctg ggttcaagcg attcttccgc ctcagcctcc caagtagctg ggactacagg |
| 74221 | cgcatgccac cacgcccggc taatttttgt atttttagta aagacagggt ttcaccatat |
| 74281 | tgaccaggct ggtcttgaac tcctgacctc gtgatttgcc cgcctcagcc tcccaaagtg |
| 74341 | ctgggattac aggcgtgagc caccgcgccc agccaactct caactctagt agcttaagac |
| 74401 | aacaaagatt tatttcttgc tcttactgtc tgcccatctg tatcaccttc tctgcaggac |
| 74461 | ccagtttaat ggagcacaca cagaaaaagg tgctggtcac tagggccaag ggaacaatgg |
| 74521 | ctctggaagg tttttcttga acaattcagt gttccagtct tggagcaata catcttattt |
| 74581 | ctactgttaa atccatggcc agaactaatc atgttgtccc actcaccaca aagccatatg |
| 74641 | cagccccacc atgtgctcag gaaagaggaa tgggaagcat ttgatgaaca gaaataatga |
| 74701 | cttcaacaat tgggactatc agttcacagt ttcaattgta aaaaaaaaaa aaaaaaaaaa |
| 74761 | agacagaaat agaaaaagaa caattgaaag tacttgcttt ctcatccacg aaaaaagttg |
| 74821 | gtcaaagcct cttagtgtaa gtctatagca gatgatgcct gataaggaat tgtacatacc |
| 74881 | gttcttcgtg aaaaccaaga gtaccatgta tgtaacatag ttgctttggg cttcttatag |
| 74941 | cagttaagag tgtatcagca ggcctccatg gtatttgaat gttaaaagct ttcattcccc |
| 75001 | ctggaagaaa acacatagct aactaaagaa agaaaaaaga agggaaaaag aacaaagaaa |
| 75061 | aagaaccact agagtctctg aaaagagctt atgagatacc tgactgtctg cgccttctaa |
| 75121 | gtatgtacca tgaaacctta gattcctacc tcattttgtg atggtgtaga aggcacattg |
| 75181 | gccaccagca acccttgtaa atatttgcgg atttgaattt cacaaattga aacccagact |
| 75241 | gctgagggct ttgctgctaa cgtcaaagag ctggggcaac taccacaaaa ccacatgtgg |
| 75301 | gagacttttt agatgaggag ataggaaatt cctaataaga aaagtttttt tgtaaaatac |
| 75361 | tttctaatgc tggctcttta gagaagcaca ttttacatgt gcaatggtgc aaagtcctag |
| 75421 | cactaagatt tcttcactca cagaaagaaa gaatgatgca ggtgctgttc acatgcggcc |
| 75481 | ggaaccatgc ccttgccaag caggtcagcg gggcacaggg actgcgctcc tcatgatagt |
| 75541 | gcagattggc tcggaagtac tcaattctgt ggagtcacag cgccctctga cagatttcag |
| 75601 | tttctggaaa aggaagggcc cccttcaggg tacctgctgt tcaccttcca ttagattaag |
| 75661 | gttgaagagc gagtggccat ttgtaggtac tggtatgaga tgttcctagc tacccgcatg |
| 75721 | tcagccccgg gaaacggcaa catttcccac ccttcttacc ctgggtcctg agtaggaata |
| 75781 | aaagttagtg attcttaggg gcatattgag agctggcaat gatacctctc acaaatccat |
| 75841 | cccccagaga taaggggtcc cccatgcctt tgatgtattt gggagcbgtg ctgtatgtgt |
| 75901 | tctctttggc tccccagtgg agaataataa caataacaac cgcgtactaa tacaacccag |
| 75961 | atgtcagcac agaccctctg ttctctgtct tccctgagat atctgtatct tctcagggat |
| 76021 | tactgtcggt tcaggcctgg ctcctgcttt cagcttgtgg gaaaactcac tccatcttca |
| 76081 | ttccataacc tcacatctcc tatgccagtt cccttctctg tgctccatgc tgaaccaaat |
| 76141 | gccacactca tcccctttgc tttgaattat atgaaaaaaa gaaaaaaccc tcatggggac |
| 76201 | tttatgtgta acagtcttca ctgcacattt gataacacag atgggggttt atatcctagc |
| 76261 | agagcagata ttgtcaatgg aaaatggaaa caaaacaaaa cacaaaagac aatcttcagc |
| 76321 | catcactatg tagcttggct atcatctttt gctttctcct ttacttctgg agtcccccca |
| 76381 | cataccctca gaaatggaga tagactctac atcaatctct gctctgggaa atctactcac |
| 76441 | atatccaaag gcaaactaac aagctcttgc tccgacaacc catcgacttg gggtctcatc |
| 76501 | cctccctgcc taccagtctc tgtgactgaa aggggcccat acagagactt attttcccag |
| 76561 | gaacgtgaat gatatccttc tcctgttcct tgaccttggg aggcagattt gattatggtc |
| 76621 | agctttgatt caaagtaagt tttttttttt ttctccctta ggagaatgtt gtgaggtgct |
| 76681 | gattgttctc tgcttcataa tcgtatcact tattactgat aatctttttc tgcccccaga |
| 76741 | ggttgctgaa gaatgtagca tatacagtgg acacagagcc ctgataatac aattactaaa |
| 76801 | ttctccaagg ttgagggcct ggtcttaggt catgagatta ctgatccttg ccttctgcct |
| 76861 | gctaggaagg cccaactaat ttcacagtct ttatcagtga accatagtaa agggggacca |
| 76921 | gaagagaaaa aggttatgtc ttttgggaaa atgccaaaat catattgtga aaatccttcc |
| 76981 | tactgttctt ctcatgggag ggggaggact ttggacttgt ttctctcctt ttcctgtaca |
| 77041 | tttggggatg tcagaaccgt ctgtttcctc atctacacgt ggttagatgc cgacaacaat |
| 77101 | ctcttctctt aaaattgctt actattagac cagcagagtg tttggtatta attgagcaag |
| 77161 | gaggaatttg taggaaaggc ttggcttaac taggagaggg aatgccaggg agaaatctgt |
| 77221 | atttcccact attttttttt ctttttttga ggcacagttt cactctgtcg cccaggctgg |
| 77281 | agtacagtgg tgcaatctca gctcactgca acctccgcct cctgggttca agcgattctc |
| 77341 | atgcctcagt ctcccgagta gcbgggatta caggcgtgtg ccagcacacc cagctaattt |
| 77401 | ttgtattatt agtatagatg gggttttatc atgttggcca ggccggtctc aaactcctgg |
| 77461 | cctcaggtga tctgcccacc ttggcttccc aaagtgctgg gattacaggc atgaaccacc |
| 77521 | acacctggcc atttcccact attttgttga taaagacatt tggatttccc tgcattaggc |
| 77581 | agatgtggaa gaagatggaa gcgatgaaaa ccttcttgcc aaaatctccc aaaagacctg |
| 77641 | gccagtgggt gagcagatct cagttacaaa aagcctatag gttgaatttt ctaagaaaag |
| 77701 | gcctggggag gaggtaccag gagtccaaat tgaagttcga ttttcattat cacagatttt |
| 77761 | catatctctc tatctccctt tttttgtttt tggtgagaca gagttcaaga ccagcctggt |
| 77821 | caacatggtg aaaccccgtc tttactaaaa atacaaaaaa ttagccagcc gtagaggcgg |
| 77881 | gtgcctgtca tcccagctac tcgggaggct gaggcaggaa agtcacttga acccaggaga |
| 77941 | tggaggttgc agtgagccga gatcatgcca ttgcactcca gcctgggcga caagagccaa |
| 78001 | actccatttc aaaaaaaaaa agaaagaaaa agaaaaaaga aaaaaagaaa atgcactttt |
| 78061 | tgcbgtcagt aaaagttaag caaaagtctt gctgagagac tgatatttaa ataactatta |
| 78121 | taatgcaatg taaaattact gcaagagata tgaacacagt gctcaggaag cttagaggaa |
| 78181 | ggagaaacca agtccttagt gatggaaggt gggctgtcaa ggaaggcttt gtggaggttg |
| 78241 | tgtaattgta ggatgagggc catgtagtag gtcgacgggg ccctcgtgtg ccaggtggaa |
| 78301 | ggaagccatt taagtctttt aagctgagtg gtggcatgat tacaagtgca ctttagaaaa |
| 78361 | atctctatgg cagcaatgtg gaggatgaag taacaaaaat atacactttg gttcattttg |
| 78421 | ttctaaatgg caactttacc tttaactgtg tacagagctt actgactata ctcaagcaac |
| 78481 | aaaatgcaca cttggaaatc ctgtgtcacg tgcctatact agctttgtcg ctgattcagc |
| 78541 | atatacacat cctccagtgt gacaggattg tgtatggaaa caggtaagac tggtgaatac |
| 78601 | taggctgtgt tcaagtgtag agtctcatga ttatcaccaa tactgbgggc tctccctctt |
| 78661 | ttagatgagt ttttctacca tatctttggc tttacaaaat atattaacac agtttcataa |
| 78721 | tagatctctt ggaatatggt cgtttggtgt taagcattct atctggcaaa atgaaaaata |
| 78781 | agatggtaag agttatccta caaaaatcct aatgttctca agctactgct gaaattcttt |
| 78841 | ttctagtaat ttacaaaaaa gtccccattt tcttgtagaa ataagccaat taaaaaaaga |
| 78901 | aaaaaattaa aataaaaaat taaagttctt aatgataaat tatattaaaa tttatttcct |
| 78961 | gttttaccct atatcctatg agcgtggttc tcaaacttcg ttcagtgcat accagaatca |
| 79021 | tcatgtgcgc ttgttaaaca gaggtctggg ttccaccccc agagcttctg attcacttca |
| 79081 | tggaatctga gaactggcat ttctgacaag ttcccagggg atgctgaggc tgctggtcca |
| 79141 | gggaccacac actgagaaat attgttctga aataataaca gctaattttt gttaggcagt |
| 79201 | ttctgtgttc caaatacagg ttgaatatcc cttatccaaa atgcttgggg caagctgggt |
| 79261 | gcagaggctt attcctgtaa tgtcagcact ctgggaggct gaggcaggag gattgcttga |
| 79321 | gaccaggaga ttaggaccaa cctaggcaac atagcaagac actgtttcta cacacacaca |
| 79381 | cacacacaca cacagacaca cacacacaca cacacacaca aattgccagg catggtggca |
| 79441 | tatccctata gtcccagcta cttgggaggc tgagggagga ggatcacttg aaacaaggag |
| 79501 | tttgagacta tcctgggcca catagtgaga ccctgtctct acaaaaaata tttgaaaaat |
| 79561 | tggccaggtg cggtggctca tgcctatagt cccagcactt tgggaggctg aggcaggtgg |
| 79621 | atcatttgaa gtcaggagtt caagaccagc ctggccaaca tggtgaaacc ccgtctctac |
| 79681 | taaaaacaca aaaattagct gggcagtagt ggtgggcgct tgtaatccca gctactcagg |
| 79741 | aggctgaggc cagagaatcg cttgaaccca agaggtggag gttgtagtga gctgagatcg |
| 79801 | tgctcctgca ctccagtctg ggtgacagag tgagaccctg tctcgaacaa aacaaaacaa |
| 79861 | aacaaaacca aaaaaaccaa aacaaaaaac atattagctt ggcatggtgg tgcattcctg |
| 79921 | tagtttcata tgtgatctca ctactgcact ccaatgtggg tcacagagca ggactcaaat |
| 80041 | gaaaacaaaa ccaaaaccaa aattcttggg accagaagta tttcagattt cagattattt |
| 80101 | tggattttga aatattggca tgtatctaat gagacatctc agggatggga cccaagccta |
| 80161 | aacacaaaat tcatttattt ttcatataca ccttgtatac atagcctgaa ggtaatttta |
| 80221 | tataatattt taaataattt tgtgcacctg tcacgtgagg tcaggtgtgg aattttctac |
| 80281 | tgtggtgtca agtcaatgct caaaaaattg cagattttgg agaatttcag atttcagatg |
| 80341 | tttggattaa atgtgcttag cctggacctt acttgttgta gctcgtttaa tcctcatggc |
| 80401 | aatgctagga cacaggtggt tttagtataa tattattaca aatgaagagc ctgagacttg |
| 80461 | agaaagtaag acaacacact ccaggtcact cagccaatta gtggtgagca agaattgaac |
| 80521 | ccagatttga tatgcgaatg acttgctgtg attctcctat tggtgatttt tttttttttt |
| 80581 | tttttttttt ttgagacagg gtcttgctct gtcacccagg ctggagtgca gtggcatgat |
| 80641 | ctcagctcac tgcagcctct gcctcccagg ttcaagcgat tctcctgcct cagcctcctg |
| 80701 | agcaactggg actacaggca tgtgctacca tgcttggcta atttttgtat ttttagtaga |
| 80761 | gatggggttt caccatgttg gccatgtgga tctcgagctc ctgacctcaa gtgatccatc |
| 80821 | cgcctcggcc tcccaaaatg ttgggattat aggcgtgagc cactgcaccc ggccccttat |
| 80881 | tggtgtattt ttatttccca agtatgacac ctgttcagag actttggaac cctgagaaca |
| 80941 | ttttgttggt gtgttttgtg actaatattg cctttttctg agatgaatgc tgttctttga |
| 81001 | aaaaacattt gtatttttag atagaaatgt acttcatccc cagtgaatat ttctgacttt |
| 81061 | agagaaattg ccaaacctgc tgactcataa caaaaataaa gagcatctac tattcagttt |
| 81121 | atggctttta gttttgggag gtggtaggag gaaggataga ttaccaccca ctatagatca |
| 81181 | ttttattttc attttatttt aatgccattt accagtattg tgtatatgga ggtggtcttg |
| 81241 | agagctttgt ggagattatt ttttcaatag tacagatggc tctgataaat atttaaggca |
| 81301 | tcttgggaaa caagaatacc atcctgactc aggagaaatt ggtcacgtaa atcactttgt |
| 81361 | ttcaagtgct ttggcctctg agcatctcaa atggacacat acttcattgg cttattaact |
| 81421 | cattgccgga gtcactgaag gcccaaacta caacttcatg cctgaccaca caccaaggct |
| 81481 | tttttattgc ttagttttct ggctctttgc ctattctgct ctccctaccc ataaccatgt |
| 81541 | gagtatcatg tccagcaaac taacttactc cttctctctc cccactacac acacacacac |
| 81601 | acacacacac acacacacac accacactcc acacgcacac atacacagag catttttcat |
| 81661 | gggtatgttg tcagacagat ttctctgttc tgaaggctca tctccttaga gaaccttacc |
| 81721 | gtgtcaatgt tgcatttagt ttagtttagt gttgttgttg ttgttgttgt tgttgctgtt |
| 81781 | tttaaatctt gctctgttgc ccacagtggc gcgatttcag ctcactgcaa cctctgcctt |
| 81841 | ttgggttcaa gcaattctcc tgccgcagcc tgctgagtag ctgggattac aggcccccgc |
| 81901 | caccatgtcc agctagtttt tgtattttta gtagagacgg ggtttcacca tgttggctgg |
| 81961 | tcaagtcttg acttcctgac ctcgtgatcc acctggcttg gcttcccaaa gtgttgggat |
| 82021 | tacaggtgtg agccactgcg accggcbgtt tttttttttt tttttttttt ttttttcttt |
| 82081 | tttgagacgg aatttcgctc ttgttgccca ggctggagtg caatggtaca atcttggctc |
| 82141 | attgcaactt ctgcctcctg ggttcaagca attctcctgc ttcagcctcc caggtagctg |
| 82201 | agattgcagg tgcccaccac catgcctggc taatttttgt attttagtag agatgggatt |
| 82261 | tcaccatgtt ggtgttgtat ttagttttaa cactgttatc ttctcagatt gtaatgagag |
| 82321 | aacaggctat catcacttgg tgataaaatt tcctgtaatt ataatctcat tctcaaagat |
| 82381 | aaaacattga tacctaatgt gcttttaact ttaatgccaa tttatcacaa tggaagacat |
| 82441 | ttcaaataaa tactgttttt ttgttcataa ggtcttaaaa atcttgaata taactgcaaa |
| 82501 | aaagcattac atgttaaaag aaatcacaaa attagttaag aaaggagcca aactgaaaga |
| 82561 | agattatatt tctatgccct tgaatcttta caaaatttag taaaaactat taatatagaa |
| 82621 | ttatttacaa gagacttctc tatttaccag cccaatatct tcacatttct acaatctaag |
| 82681 | gggaggtgat tgtggccaga aaagtttctg ggctctggta ttgcagtttt cctgcactta |
| 82741 | ccaccatccg gcatgttata tattttactt atttttcttg cttattgctg tctctttcca |
| 82801 | caagttccat gagcagagac agtttatctg tgttttttac ggctattctc aatgtctgta |
| 82861 | acagtgtcta acgtactata gtcattaaag aaatgctggt tgggtgaatt cagaaataaa |
| 82921 | ttagtaaata ggtgaagcat gttggtttaa tattcatcat cagaacttaa aaacagttta |
| 82981 | aagaacctca actgagtttt gtacaataag tagtgacaag gtgggacaga ggtaatttct |
| 83041 | ttgtatctct gaggctttcc atttcatgag gaacatagaa taatatgtgt ttccaaatgc |
| 83101 | agtgttcaat atctgaagag tatatatcat cagtatagaa aatagacaac acatgttaaa |
| 83161 | gggaatgtaa aaattctaga tgatttttaa ggtatgtatg gtttaatcaa ttgtttatat |
| 83221 | gctattctct tctcttaaaa tgaaataatg cgaatgaaaa aataaacctt acaggtagtt |
| 83281 | tctgggaaat tcagacaaca aaattgtcta acatacgcca aaaacaatat agcatttaat |
| 83341 | gatgacatgg attccgaaag acaaatcact gctcatcata ttacaaggaa tccaaacaac |
| 83401 | tgaggggtta tcatttatct atagttgcat aacaaattac cctaaaattt agcagcttaa |
| 83461 | aacaacaatt tattatttca taaatttctg gggatgagga atccagaagc agattcactg |
| 83521 | ggtggttctg gctcaaagta tcttatttgt ttgctagggc tgcbgtcaca gaacacaaca |
| 83581 | gcacaggtgc cttaaataac agaaacatgc attctggagg ccagaagtcc aagaccaagg |
| 83641 | tttcctctga ggtctccgtc cttggattgc agatgcttgt cctcttgctc cctcttcaca |
| 83701 | tggttgtccc tctgtgcaca tgcacttctg tgtctctttt tgagtgaaaa tttataagca |
| 83761 | ttccagtcag attaattttt tttttttttt tttgagatgg agtctcactc tgacacccag |
| 83821 | gctggagtgc agtggtgcaa tcttggctca ctgcagcctc cacctccctg gctcaagttc |
| 83881 | ttctcctgcc tcagcctccc aagtagctgg gattacaggc atacaccacc acgcctggct |
| 83941 | aatttttgta tttttagtag agacgtggtt ttgtcatgtt gcccaggctg gtctcgaact |
| 84001 | cctggcctca agttatccac ctgccttgtc ctcccaaaat gttgggatta caggtgtaag |
| 84061 | ccattgcacc ctgccccagt cagataaaat tttaatctca ctttaactta atcacttctt |
| 84121 | tgaaggccct gtctccaaat atagtcacat gaattagggc caagctgtat ggcttcattt |
| 84181 | aaccttaatt acttctttag aggctctatc tgcaaatgcc tccacattct gaggtggtgg |
| 84241 | gggggttagg atgtcaacat atgaatttga gggggcacaa tttagcccat agacacctgt |
| 84301 | catgaggttg tagtcagctg tcagttgggg ctgcaatctc atctgatgga ttaactgggg |
| 84361 | aaagatgggc ttcccagctc actggtgtag ttgttggcag gcctcagttt cttctcgctg |
| 84421 | gagacttcag ttcttgccat cggcttctcc acaggttgtc cagattacct aatgacatag |
| 84481 | cagctggctt ccccaaaagc atggaatggg ggttggggat gggataagag agagagaatc |
| 84541 | caagacagaa tgcacagtct tcttataact taggtttaga aataatatat cagtacctct |
| 84601 | gccacattct gttggtcaca cacactaacc ctggtaaaac atgggagtga accatacagg |
| 84661 | gggaactggg gtcattggtg gtcatctttg aggctggcta tggtaattag gtaaaaataa |
| 84721 | aaattcagtc tgcagaaacg tatgtactta tgttacttaa aatattttaa ccaattagtg |
| 84781 | aaaaatgact ttgaagtatt tttagctgct ataataattg agtaggaatt attttttctt |
| 84841 | ggattgagtt atatttacta taaaaatact tacttttttt gtcaaacaca tttataagtg |
| 84901 | ctgcaaatat tagtgaccaa tggtctattg ctctaaataa aaagcaccag gagttagtat |
| 84961 | agtagttgac tccagcctct ggtgctagac tgcctgggtt tgaatattta cttttgcact |
| 85021 | tacaacttgt aacaacttga acaatttatt caatctctct gttccctagt tttctcatat |
| 85081 | gtcaaatggg agaaacaaat aacatctgct tcatatggct gttatgaagg ctaagtaggt |
| 85141 | ttatatatat gtatgtatgt atgtatgtat gtgtgtgtgt gcatatatat atatatatat |
| 85201 | atagagagag agagagagag agagagaaag agaacttaga atagggcctg gcacagagaa |
| 85261 | tatgataaaa gaatattatt tgtttcctct ttttatcatc cagaacatgg tgtaatgccc |
| 85321 | aatacattgt agatactcaa taaatgtttt tgtatgatcc ctaaacattg tctgtaagga |
| 85381 | atttacaatg gagtttacag taaaaggtgg tacatggtag gtaccatgga agcattacaa |
| 85441 | acagatgacc atgtgaatct gaaagaagca cagattgatt tcttcgtcat aaaacatggt |
| 85501 | tgtatttgag ctaaagctta gaactaatga agattattgc caggcgtggt ggctcacgcc |
| 85561 | tgtaatccca gcactttggg aggccgaggt gggaggatca caaggtcaga agatcgagac |
| 85621 | catcctggct aacatggtga aaccccgtct ctactaaaaa tacaaaaaat tagctgggtg |
| 85681 | tggtggcggg cgcctgtagt cccagctact caggaggctg aggcagaatg gtgtgaaccc |
| 85741 | aggaggtgga gcttgcagtg agccgagatc gcgccactgc acttcagcct gggcgagaat |
| 85801 | gcaagagtct gcctcaaaaa aaaaaaaaaa aaaagagtat caatgtatca aaatcattat |
| 85861 | tttaggctgg gcatggtggc tcacatgtgt aatcccagca ctttgggagg ctgaggtgag |
| 85921 | agatcacttg agcccaggag ttcaaggcca gcctgggcaa aatggtgaga ccctgtctct |
| 85981 | acaaagaaaa aaaaaagatt attattcccc aaataggaaa taacataagc aaacgtcccc |
| 86041 | tatttccccc acgatggagc tggagcatgg tgtatgagaa ggagagtcag agggagcaag |
| 86101 | aatgaagggg tcaggttggt accaggtaat gaaatcattt taacataaga ctacatgatt |
| 86161 | tggacttcat tgtgtggtca cttcggagca ttttagcaac aaaataatgt cttaggaaga |
| 86221 | ttaatctggt ccaattgtaa agtaaattga gattcaggct tcaggcttgg cttgatccag |
| 86281 | gattcaaata aaatcaccaa gaatctgtat ttcagatctg ctttttttgt gtggctctgc |
| 86341 | ctgtggctcc ataagaagca cagaaaaaag agaaatggtc tgttaaacag aaaaagtgaa |
| 86401 | aaagcttcac tcccagaaaa tatcttcttg catctcatcg gcctgagttc actcatgttc |
| 86461 | gtattcttca acaaattatc atgtccagga tatgaaacgg ctgcttggat ccaggcacac |
| 86521 | tgataacgct gataccacac ctagaaaaag aaatgaattt cattcaaatt ccattctact |
| 86581 | attttaaggt ttcatgtcta gatggctgga gattaagtgt tgcagtccag gcgtggtggc |
| 86641 | ccacgcctgt aatcccagca ctttgggagg ccgaggtgga cagctcactt gaggacagga |
| 86701 | gtttgagacc agcctggcca acatgatgaa accccatctc tactaaaaat acaaaaaata |
| 86761 | gccaggcttg gtggtgcgtg cctgtaattc cagctactcg ggaggctgag gcaggagaat |
| 86821 | cacttgaatc caggaagtgg aggttgcggt gagccaagat ggcactactg cagtccagtc |
| 86881 | tgggtgacag agacttcatc tcaaaaaaaa aaaaaaaaag taagttttgc aattaggaga |
| 86941 | catgcctata atgtttattt agtggtgata cgtatggttt agtcctttaa ttatagtgtg |
| 87001 | gtttaaatgc aaatttaaag taactcaaat acagctattt tttctcacat catagggaga |
| 87061 | ctataaagtc cctcagtaat cattcttcaa atagatattt ttcttctttc atctactgcc |
| 87121 | ttcacgactg cagtcacttt ctccaacagt cttttctcca aataaaaaca aaaacaccac |
| 87181 | taccaccact accaaaaatc tcaagtacct gctatctctg atctttctca tctgctaata |
| 87241 | ttctcttcct cccttactcc cctcctcttt tcttcctttc ctccttcccc atctctccat |
| 87301 | ctcacacctc cctctcttcc tacctccctt tctttcaacc ttttcccctt ctattcttcc |
| 87361 | ttccctcgct tcctccttcc cttccttcct tccttccttc cttccttcct tccttccttc |
| 87421 | cttccttcct ttttgctatt aaaaattcct caaactggct gggtgtggtg gctcatgcct |
| 87481 | gtaatcctag cactttggga tgccgaggtg ggtggatcac ttgaggtcag gagtttgata |
| 87541 | ccagcctggc caacatggtg aaaacccgtc tctactaaaa atacaaaaat tagtagtgta |
| 87601 | tggtggcacc gcacctgtag tcccagctac tcagaagggt gaggtgggcg aatcacttga |
| 87661 | acccaggagg cagaggttgt agtgagccga gatcgttcca ctgcattccg gcctgggtga |
| 87721 | cagagtgagt gagactgtct caaaataaca acaacaacaa aaacaaactg gcaatgcagg |
| 87781 | acttccttga aagacagagg aaaggaaaag attaagagaa gttataccaa aactcttttt |
| 87841 | aataggtagg cagggaaaaa attgggaacc tttatacatc aataatttta ttctcataat |
| 87901 | acttggaaat catgactagc tgttgctctt cttcaacatc taactattat catttccaca |
| 87961 | tctgattcaa gcacttcctt tttacatgtc tttttttttt ctttgcctga aatattattt |
| 88021 | ccttccatca aattaacctt tctgcccacc tggcaaccct ctcttcttca agccttactc |
| 88081 | atcaagaagc cttccctagc aacagggaag gctctgctac caatcccacc tttatgctct |
| 88141 | ctggactacc actttgtctt gtacatttct attaaattgt aacttttcat ttttgttaca |
| 88201 | catctattga ctctactgct cagtgaacta tttgagacca ggacaccatt ttgcatacct |
| 88261 | agcacaatac ctaccacata gtagacattt cataaatcct tattgattga ataaatcaat |
| 88321 | gatgaataac atttttataa atttcatttt gtatttgagt tgaagctcca agtattacac |
| 88381 | cctgttagag attttaaact tgatttttaa aatattggac tagagcttaa aagaagatta |
| 88441 | tattagtcag gggtctcaag agaaacagaa tcaataaagt atacatttat tatataattc |
| 88501 | attataagaa attggctcac atgattgtgg aggctgacaa gtctcaatac ctacagtcgg |
| 88561 | caagctagag acccaggaga acctatggtg tagtccaggc tcattccaaa ggcctaagaa |
| 88621 | ccaagcgagc caatgatgta gttctagtgt gaaaacctgc aggctctaga cacaggaaga |
| 88681 | agccaatgtt tcagttaaag tccaagggca ggaaacacca aggtcccagc tcaaacatag |
| 88741 | tgagacagaa ggaattctct cttactcagc cttttgttct attcaggctt tcaacagatt |
| 88801 | ggatgaggcc cacccacaat ctgctttacc cagtctactg atttagatgt taatctcatc |
| 88861 | cagaaacacc ctcacagaca cacctagaat aatgtttgac caaatgtctg ggcaccctgt |
| 88921 | tacccagtca agtggatgca taaaattaaa caccataaag actaaagcct gtagatgaat |
| 88981 | atctggtaac acctcacaga ggagagacct aaagctgtga taacgtctct gaagccaaga |
| 89041 | gagaaaggct agaaaaagca agatctggga tatttcctta gaatccttgc ctgaaggcca |
| 89101 | agaagatgag gaagttaatt ttctcatcca gagtggtggt atcgagctag aaaattgtga |
| 89161 | agatctttct agttctaaaa catctgttac ctccttacct tggggtttca agactgggta |
| 89221 | aatggaaata ctaagataat tggatgatgt aagaagattt tggatgggaa caatatcttg |
| 89281 | ttatgcacca gttgtatgga aactacttat ttataagatt taaaattcta cgtatattcc |
| 89341 | ttcaggaaat gttgtcggct ttctacaaga tgcagcttta attgtattat tgggaaccat |
| 89401 | cattgattat taggttcttt ggagaaattt ctttccttca attagaagca cccatgaagg |
| 89461 | atatgaagaa gagttggtca aagaactata agaagatcat agaatgtact gcactataga |
| 89521 | agccaaagga agaggtaaat caagaggcaa gaaatgatgg aaaggtattt tgctatagag |
| 89581 | aggtaaaggt tgataagact tgggaaaaag gccatcggat tttacgatta ggatattaag |
| 89641 | gacaagtttc agccaagtca tgagaaactg agcatcagtt aggtccctgt tgtttgatat |
| 89701 | tatgacaatg tggtggattt agtaattaga gtctttcaaa attgtctgtt agtgctttgc |
| 89761 | agcttggggg catgagcaga gaaggtaggg ggcaggagga atggggagca tgtctgtggc |
| 89821 | tgagagttga aggcttgaat ggtaagagta ggcttgagga ttgtggcttg ttagaaaaga |
| 89881 | cagcattaaa atatctgaac atgggacttt gtttttagaa aggatacaaa tgaagttaaa |
| 89941 | agccagaaga aggtcttggg tgggattttc aagctgcatt ccttggagtc ttgaatcgtg |
| 90001 | gattagagaa aagaccaccc tgtgttgatc tcagtagctt ctcctgttaa acatcacagc |
| 90061 | acatgtgctt tgaccagttt tgtatattaa ggctctatgt ggctatcttc tgtcccgctc |
| 90121 | tgtcccccac ggccattctc tttccttcac catgctgctc tatgacccgg gaggctgacc |
| 90181 | tatatggacc atatcagtgg gctgctttgc cctcctgctt ctgtttggat tttgcccttg |
| 90241 | gggagcactt gcatgagctt gcagggaggg agaatgagag gcaaggtata atctgctgtg |
| 90301 | acctacaggg tcatcaggat cctttcccct tcaggcctag agttggtaat aatgcccagc |
| 90361 | tttcttaggc ccttgaaatt tctctatacc ctgctatatc tgttcaattg cctacataac |
| 90421 | ttaaccagtg tatgcttact actcactgca gccttgatct ccctggctta ggtgatcctt |
| 90481 | ccacctcagc ctcttgagta gcbgggacta caggtgtgca ccaccatgcc tggttaattt |
| 90541 | tttgtatttt ttttgtagag acagggtctc accattttgc ccaggctggt cttgaactcc |
| 90601 | tgggctcaag caatcctccc accttggccc cccaaaatgc tgagattaca gacaagagcc |
| 90661 | accactcccg gcccaaacat tttttttttt tgtaaaaagc caggcagtaa atatttttga |
| 90721 | tctgtgagtt atacaatctg tgttaccacc acttaactct gctatctcag tgagaaaaca |
| 90781 | gccatagatg ttaagtaagt gaatgaatgt agcbgtgttt caataaaact ttatttacaa |
| 90841 | aaacaggcag tgagctttgc ttttggccca taggctataa ttgaaagacc catgatctag |
| 90901 | gacaagaagt tttccatcta ctctatgaga gtggttctca atctgggata atttagctcc |
| 90961 | ctaagggaca tttgttaatt taagacattt ttggttgtca caactggagg agtagtgcta |
| 91021 | ctggcatcta gtggataaaa tccagggata ctgctaaaca tactgcaatg cacaagacag |
| 91081 | cccccacaac aaaaattacc ctgcccaaaa tatcaatagt gctgaggttg agaaatgctg |
| 91141 | gtcttgaaga tgttaaaaag attgtcagtt tgttcatcat atcgctgtgg cttggcgaaa |
| 91201 | agaatcacag agttaatttt ataactatga aggattgtta ggagctgagt ttttttctag |
| 91261 | ttcttatttt ttaattattt tatgatactt ttcataaaaa gtggtgtaag ttgtgtttat |
| 91321 | tcagaaatgt gatttttttt tttttttttt gatggagttt cgctcttgtt tccgaggctg |
| 91381 | gagtgcaatg gcgggatctt ggctcactgc aacctccgcc tcccgggttc aagcgattct |
| 91441 | cctgcctcag cctcctgagt agcbgggact actggccacc atgcctggct aatttctgta |
| 91501 | tttttagtag agatggggtt tcaccatgtt ggccaggctg gtcttcaact cccgaactca |
| 91561 | gatgatccac ctgcctcggc cttccaaagt gcbgggatta caggtgtgag tcactgctcc |
| 91621 | cagcccagaa attgatggtt tctttagcaa ttttgtcacc catcaagtcg ttagtcatat |
| 91681 | taatcctcca taacttagtc tttttgcccc ctgattatct tttgggtggg cagtgaaagt |
| 91741 | attcatacct cttttagcaa aacctatctc ttcttggatt tcctttgctt gctgattaag |
| 91801 | aggaaggact atctgtgaaa gactcagatg tggctcaatg gaatgaatgt gagaatggta |
| 91861 | tgagtgtggg tggtgggtgc tgtgggggtc ggagatgagt ggctgaacca tccaaaaata |
| 91921 | agaatactga caagcgtgtt ttcttgtgtg tgtgtgcgtg ttgtgggagg agtgtaactg |
| 91981 | atgtggctag acaggattaa cgaaagtctc aggagttgag agagactggg gacattttac |
| 92041 | caatggcgag aaggaggaag gatgacagct gggaaaatta gtgattggaa aaggtaggct |
| 92101 | gggcagtgtg gccatgagct agtccttttc attatattct tctggggctc tatgtttaaa |
| 92161 | actagatact ttaacatttc agaatgagaa agagaggaaa ggatggtaac tgatatgggc |
| 92221 | tattatactg tgaattttaa aggagcctat atattatcct aaaactattg aacctgagca |
| 92281 | gaactgcaac gttggtattc ttgaactgaa ctgatatttc ctttgactaa tgtccttgtt |
| 92341 | caatgaccag agaccatgac actccccacc ttcaccccca cacattgttt gtttgtgtcc |
| 92401 | agtttgaaga acaatgacac atggaggtca gtgtttggat gatgtcataa ttttgatcag |
| 92461 | ctggaaagcc tggagtggcc ttgaagagat gcttaacttt tggaaatcac ttctttattg |
| 92521 | caaccaaagc tattaagttt aaaggtccat aaagatgaga taaacagtca taaaggcctt |
| 92581 | ttgaaattca tacttagtgt gttaaatgga tttaattgct gttagttaaa tgtggtgatg |
| 92641 | ttaaagcaat gtctatacac tggcaaaaat cagatcatca actgcttaat gagggacacg |
| 92701 | tcttgagaaa aacagtggaa gaaatgctgc ttatatgtaa tttgtgatta atttttgcaa |
| 92761 | ggttttcaag ggaataactt ggccttaaaa tattacagtg aaaaacagct ttatacttgg |
| 92821 | gtccaatctt cttaaaatta gagttcattt ttgctattag acacctttta ttacaggata |
| 92881 | actttttctt cccccttgga gacagagtct tgctctgttg cccaggccag aatgcagtgg |
| 92941 | cgtgatctcg gttcactgta accaccgcct cccaggttca agtgattctt gtgtctcagc |
| 93001 | ctcctgagta gcbgggatta cagtgcctgc caccatacct ggctaatttt ttgtatttta |
| 93061 | gtagagacag ggtttcatca tgttgctcag gctggtctga aactcctgag ctcaggcaat |
| 93121 | ccacccgcct tggcttccca atgtgctagg attacagatg tgagccactg agcccagcca |
| 93181 | gttataggat agcttctaaa cttacaatcc ttgaaatatc attttaggat aattctgatc |
| 93241 | ctgcatacca gtgaaataag tataattgaa atattaaacc aaatttggct tcaacattaa |
| 93301 | accaaaatta aaccaaatta agccagtatg ttaaatacat agtttaatct taattctagt |
| 93361 | taatattttt catttcctat gtgtcaggca atatactaaa caacttacat gtattactat |
| 93421 | tttaattctc ctggtaaact ggaggggtgt gcaattattg tcatctccat tttatagatg |
| 93481 | aagaaaactg agtcataaag aggttatgta cttggctgaa agtcacacag tcagtgatac |
| 93541 | tgttggaatt tgcacccaga caatttaatt ttagagccta ttttcaacca ctctctgaga |
| 93601 | ctgctttcct tttctgtact tttgatgata aatgtgaaaa gataattttg agggcattat |
| 93661 | ggtgtattgg atcttaaaaa cccaggtaat aagtcccatc tatagtacaa ataagctgcg |
| 93721 | tgatcttagg gaaatcacat aactgcttct gtaaaatgag agattacatt aagttatttc |
| 93781 | caaaatgtct tttcgacttc aatgtggtga ttccatagta atgtataggt ttttaaaaaa |
| 93841 | ccatatcctt caatcaaatg gtcatccttt agcattaagt tgtttggaat agatactccc |
| 93901 | caaattcaca gaataatttt ccagcctctc tttttgcttt gacacctttc ttattttttt |
| 93961 | tttttttctt cgagataggg tctcactcag tcgctcgggc tggagttcaa tggcacgatc |
| 94021 | ttggctcact gcaacctctg cctcccgggt ttaagcaatt cttgtgcctt agcctcctga |
| 94081 | gtagcbgggc tacaggcgtc cgtcaccaca ctcagctaat tttttttaat agagatgggg |
| 94141 | tttcaccatg ttggtcaggc tggtctcgaa ctcttgacct caggtgattc ctcggcccta |
| 94201 | gcctcccaaa atgctgggat tacaggcgtg agccaccgtg cccgctattg accccatttg |
| 94261 | ttgatgctta gggatgaaag tggaaactcc actgctaaaa cagagaatat tacttgagtc |
| 94321 | attcctctgt catatatggg atgtttgcca gcatggaaca ttcacagaaa ttataactgt |
| 94381 | aaaggcccta gcaatgattt aatgccgtct cttcacatta tagttgggga agctcaaact |
| 94441 | gtgacagggt cagggacagg taaaattcac aaagttggtt tacagcagaa ctgtgctaca |
| 94501 | gttatctgga ttcagatcca agtcccctcc aaatgaatca caaccacttc tacctttata |
| 94561 | attccaggcc atgaaagatc actgttttag tctgcgtggt gcagtggaac agatagacct |
| 94621 | cggtttgaat ctcagctcta ctgtttacta gacatgaaat ggggaaatct aaaatgagta |
| 94681 | agtatacaca gaaacacaca ttacatacat atatgtaatg ttcaggatca ttacactgaa |
| 94741 | ctttagggct tagtactaat gtacaatcaa ggttgtgtta gtactgagca gtatatcttt |
| 94801 | tattgttgaa gtccaataag aacagagcag atatcaacct aatttgtaag tgatgcattt |
| 94861 | tcctaaacta aatgcccaat aatggaatgg gctagaatat tgcaggacag ggctgtgaat |
| 94921 | ggaggaaagc agttggaaaa tcaatccttt taaaggcaca aaaggatgaa tgaaccacat |
| 94981 | tcccaagaac ctgctcccac ccactgctgt tcccaccccc gctgtagttg gtagcatgtt |
| 95041 | cacaaggaag gagctggcta gctttcatgg gagccacatc atccatcaaa tcacattagt |
| 95101 | gttgttgatt tgaatgttgt ttcctttgta ggtctgcttg ctttgacttt gtaaaattgt |
| 95161 | ttagtcttgc cattattata taaggactat aatcataagg catttatatt tcattttgta |
| 95221 | ttatgtattt aagcaaaatt aagttaaaaa ttagacagag atatatagga tgatttttcc |
| 95281 | ttcaagagtt attcatttat ttccttttgg atatgaaaaa cgcttatgca gtcctgtatg |
| 95341 | tggtctctct ctctttttat ttttatttat ttattttttg agatggagtc ttgctctgtt |
| 95401 | gcgcaggctg gagtgcaggg gtgctatctc ggctcactga aacctctgcc tcctgggttt |
| 95461 | aaatgattct cctgcttcag cctcctgagt agcttggatt acaggtgcca gccaccatgt |
| 95521 | ccggctaatt tttttgtatt tttagtagag acggggtttc accatgttgg ccaggctggt |
| 95581 | cttgatcctg acctcaagtg atccgcttgc ctcagcctcc caaaatgctg ggattacagg |
| 95641 | catgagccat tgtgcctggc ctgtggtctc tttttaaatg tttgagattt tctctgacca |
| 95701 | tcacatgatg gcagccgcaa gttgtaaata tattaaatga gataatacca aatggcataa |
| 95761 | gaccactgtg aattcagtga tgttccaaaa taacttgtat tttattcatc acacaggcat |
| 95821 | ttatataaat taaaaaataa tagcacctga aaacatgaaa ataattgtat tcaaggttat |
| 95881 | ttactgcagc atgattttta agagaaaaga ctggaaacaa cccaaatgtc cactaatcga |
| 95941 | gactgtgtga acccaagatg ttatagctgc atcacacagc tgagagaagg aataagatct |
| 96001 | atttctactc actgccagtg gtaatctcca ggaagcgctg ttaagtgaaa gagcaaacta |
| 96061 | gagaaaatgt gaatagtggt taccatttac ccaagaagtc tatgtgtggt gtgtgtgtgt |
| 96121 | gtgtgtgtgt gtgtgtgtgt gtgtgtgtgt atgtgtgatt tctagaggga cagaggaaaa |
| 96181 | aggtgaagac aaggatagga gcgagacttc tctgggtaca tctttttttt tttttttttt |
| 96241 | ttttttgaga caaagtctca ttttgttacc caggctggag tgcagtcgct tgatctcagc |
| 96301 | ttactgcaac ctctgcctcc ggggttcaag tgactctctt gcctcagcct ctcgagttgc |
| 96361 | tgggattaca ggtgcccacc accacgcccg gctaattttt gtatttttag tggagactgg |
| 96421 | gtttcaccat gttggccagg ctggtctcct gaccttaagt gatccaccta ccatggcctc |
| 96481 | ccaaagtgct gggattatag gtgtgaacta ccatgcctgc ctgtctggat ctctttttag |
| 96541 | tacatttgac tttgaagcca agttagtatt ttccataatt aagaaaaaaa tagaataaaa |
| 96601 | aaggaacaat ttctaaaaag gaagtcaaaa gaaacacatt aaactaactg taagttgagt |
| 96661 | tggtagcata accacacaga cagaaattat ttcaagtgac tttaacacat actgatgtga |
| 96721 | ctgtgcatcc ctatcgagat agaaataaag gtaaatataa ataaaggtaa aaataagcaa |
| 96781 | gatataaata aagttaaaat gaactgcaac aatcctgaat agttttcaat aattatatca |
| 96841 | taaatagtaa ttttggtatt gttattttaa aacagttata tttataatac atatgttaat |
| 96901 | gtaatcatgt ttatgcttat cataacatat ggatgcacag ctattaggat aatgtataaa |
| 96961 | catgattatg ttaatgccat tagggaccaa gatttcagag aaaaacaaag aaaaatataa |
| 97021 | aattaaagaa gccagtaaaa atgttatctt aaatttaaac tggaaacctc agtataaact |
| 97081 | cataatgtgt tttcttttaa aaaattattt tcaaattcag tctcctgaat agaactcgca |
| 97141 | acaattacca agccagtagc aacgacaata aacagcccta gtgcccagat ggtgctctcc |
| 97201 | aaatgccatt ttccactaaa aggaatgagg gctccttgga gaattggatg ttttcagata |
| 97261 | cagagcagaa cacatacaaa aagttcctgg aacatttgtc atactgaaaa gcagatacac |
| 97321 | tatgaaagac tatagtaatt gtatcaaaag aactcaggag ccaccatgaa gaggccccca |
| 97381 | gtgtccagaa atggaataat gtgaacatta agaataataa atcttaattt gtcaagatac |
| 97441 | aaatttaatc atatcgtaga tactcatagc agcattattt aaaataatga aatattagac |
| 97501 | acaacttaaa tattcaaaac tagcagtgtg cccttatata tagaaatgtc atttaaacct |
| 97561 | tgtagaagag aagtttatga tttaggaaga tgtttacaat atgctgtaaa acacacacaa |
| 97621 | caagtcataa aatattatgc atgcagtata ttccagttta ttttaaatga tctaggtata |
| 97681 | aatatccata aaaagaaaac tgaatgaata aatggtgaaa tgtgaatagt tgctatatct |
| 97741 | gtgtggcagg attacaggtg gttgtattct agtttctctt tatgttccaa tcttctacag |
| 97801 | ttagcatgta taattttata tttttttaat acaaaatatg ttatttaact agtatttact |
| 97861 | aaacaaaaaa ttaaaaatta atatatttta taaaaacaaa agcatatgaa tagaaaagta |
| 97921 | cattattttt taggttatag acaatgcttg tacctgtgtt tagggatttg atcctccagg |
| 97981 | taggaaacta cagatctaat ttaacttatt taattaatta attaattaat taatttattt |
| 98041 | atttatttac tttgagacag agtctcgctc tgtcaccagg ctggagtgca gtggtgtgat |
| 98101 | ctcggctcac tgcaacctcc acctcctggg ttcaagtgat tctcctgcct cagcctcctg |
| 98161 | agcagctggg actacaggca tgtgccacca tgcccagcta atgtttgtat ttttagtaga |
| 98221 | gacggggttt caccacgttg gccaggatag tctcaatctc ttgaccttgg aatccaccca |
| 98281 | cctcaccctc ccaaagtgct aggattacag gcgggagcca ctgtgcctgg cctaatttaa |
| 98341 | aaaattttta agtcaccaaa aagcaaagtg acatgctcaa gtccattatt gccaagcaaa |
| 98401 | gaaaaaaatg tcaaaagtac aaaatgtggt tatgttttaa aaattagatt attattatta |
| 98461 | agataggatc tggctctgtt gcccagacgg gagtgcagtg gtgtactcat ggctcactga |
| 98521 | agccttgact tcttgggctc aaatgatcct ttcacctcag cctcctgagt agccgggact |
| 98581 | ataaggcagg caccaccatg cctggctaat taaaaaaaga attttttttt tgtagcaatg |
| 98641 | aggtctcact atgttgtcca ggctgatctt gaatgcctgg actcaagtga tcctcctacc |
| 98701 | tcagcctctc aaagtgctgg cattacagtc ctgaaccacc atacctagcc agatttctat |
| 98761 | tactttgaca tggtcctgga tacttcatct atgtgtgcaa aatttcgtac ttatctctta |
| 98821 | aatctggaga aaaatggcca aatttggtat agttgaattt atcatggggt gattaataag |
| 98881 | tgactaaaga ttgaccttca aggatctgaa gatctgacca gtgtagattt atagtaatta |
| 98941 | tagtaattac atggtacctc caggtatttt ctatacattg ccgtagttag ctatgaaagg |
| 99001 | atgtaaagaa taaaggcaat tgactatttt aaagaaatta acctcagaag gagattcttc |
| 99061 | acctaaatgt ccctgcaaat attattgctt tatgctctga gttagctgaa aatgagttta |
| 99121 | ctatgcctgg tgtaaacact tgcaccaccc acctgtgtca aagaactttt cactaactgc |
| 99181 | atcatgactg attgacgtca gtctacttgg caaccaagtg agccacttag aagaaggctc |
| 99241 | cccttatgag gttaatttct ttaaaatggt gaattgccct tattccttat gtcttttcat |
| 99301 | aactgattac acaaatgtat agaaaatacc tcttgagata caatacaatc tgtaactagt |
| 99361 | catcagagaa taacacgtta ttgtaacaca gatttagctt ggccataaag ggcatattta |
| 99421 | catacacatt gaaaacaact ttaataaaat gaaaaacata tatccttgga ttcttagcaa |
| 99481 | tttaacagca atgctctcag gggatcaagc tactatttat tgactccccc tgtgtgcctt |
| 99541 | acacgtaatt actgaccctc acaacatccc tgggagttag tgtcttacag gagacctttg |
| 99601 | acatttgtga gaggacatcg tgaatatttt ccaagtcctc aatccaaaag tgtggacata |
| 99661 | gctgttggtt ttcctgaatt gtatttcttt caagaatcaa atgttgcttg tgaatattct |
| 99721 | catgtaagat taaaaaaaat cttttcctga ctcttagaac tttagtttta tctctgcttt |
| 99781 | gagagccact ttaataagca aactaaaatc actctacaga aaggctgtac agcaaatgag |
| 99841 | tagagaacaa aagctggcta aactgggcag tcagctaaga tcactcagtg tctgagaatt |
| 99901 | tgttctagaa aatcaccctc cgagaatcat gcagattgtg cttaggcttc cttcatatat |
| 99961 | tcatactctc ctcgggtgaa cataaattgg cacatttata aggaaatttt attattatat |
| 100021 | actcaaatat ttttaaacat ataaatagtt tgtcttgtta attctacctc ttggaatcta |
| 100081 | tcctaaggaa aataatcata agatatctgc aaagaattat ttgaatgttg ataataattt |
| 100141 | tatctataac aataaaaatt tgcaaggtgg cagatatcag tttatgtctc tgagctccaa |
| 100201 | atccaccctt gtttatcttg ctttgtgtga atggagctgg accctgtgga tctttctctt |
| 100261 | ttgcaaattt gggggatatt caactttgtc aattgagggc actggagaga ccctgcaatg |
| 100321 | gaatagaggc tccaggtgca cctacaggcc atctttccct accagcagcg atttcagagt |
| 100381 | aacttcagcc tgtccatacc ctccagcaat ggtgggtcac ttctatagat gaactctggc |
| 100441 | ccacccgcag caccaagcaa aggaaggtca ctcctgtaca ccagcttcca accactctca |
| 100501 | tccaccagtg atgatagatt gcttttatgg atcaatgcca gcctttgcac tcagtcgttt |
| 100561 | ctttgttcct gcaggctgcc tgtggtagtt actatctctc tgaagaggtc tgaatctcag |
| 100621 | ccttggggca aggagggctt gtcctcatcc ttagtgcctt tactgttctt cttcctcagc |
| 100681 | ctagaaataa tagctccttt taaaattctt gatgcctggg cctcttagag tcctccttta |
| 100741 | tatatctttt agtaggtaat ttttggaaca ttaaattttc cctgttcaaa taattatcat |
| 100801 | agtttttgtc ttccacttgg accttgaatg atacaaaagt taaaggctca acaataccag |
| 100861 | acttgttaaa taagtaggga gctatccaca cactggcata aaattgtttt gattatctat |
| 100921 | tattcccttg gtgaggtgac ccagaccctt gtttgaaagc gttttattgg ctgggtgtgg |
| 100981 | tggttcatgc ctgtaatccc agcactttgg gaggctgagg tgggcagatc acctgaggtc |
| 101041 | aggagtttaa gaccagcctg gccaatgtgg tgaaacccca tctctactca aaagtacaaa |
| 101101 | aattagctgg gtgtggtggc gggtgcctgt aatcccagct actcgggagg ctgaggcagg |
| 101161 | agaatcactt gaacccgggt gtcggaggtt gcagggagcc gagattgtgc cactgcactc |
| 101221 | cagcctgggt gacagagcga gactccatct caaaaaaaaa aacaaacaaa agaaaaacaa |
| 101281 | caacaacaac aaaagaaaaa acaaaaatga aagaaagggt tttatttgtc ttctctctct |
| 101341 | ctccctgttt tttttttttt tctttttttt ttttttgtct catctttgct gtaattgctc |
| 101401 | atttgctagg gtcattggac acagagatac caagatgtct tcagaaatca tgaatattcc |
| 101461 | ccaagtcctc tatcaaaaag tgtggacaga gctgtcggtt ttcctggggt ttagacatgt |
| 101521 | tctttcttgc ttctgttgtg tagtaaccct agctcctcaa ggaaatcgtg gtctatgggc |
| 101581 | tctgccaaac agtaattcct ttctttgctt gctggctcac tggcttgagg aactcaaagt |
| 101641 | aatcctttgg taatttcagc ttccaggtca gtggggacat taatgtgttt cttggtagaa |
| 101701 | atgtcactct actccaagaa ataagatctt taatccagaa aacctgagtt ttcagggaca |
| 101761 | gaatgcacaa acttttatgg tcattcactg ggagttctaa tgagcaggtt cgatcatatt |
| 101821 | tctattcttt agttcctcga cccatgcatt ttagctactg ggcggcgaac catgtatcag |
| 101881 | ctgttagtgc tgtgtgtatt ccatatcatg aaggtaattt cccaggccca caacgttttc |
| 101941 | ttcccaagct ggtgccgtaa ctgagccttt accaggctat tccatcattt taggtgtttc |
| 102001 | tagggtatag agtaaatgat aagaccagtg actcccatga taaatgtgca ccatggtgaa |
| 102061 | cttcctttgc tgtaaaatgt catcttggtc ctagtctata tcgtaagggg caccatactg |
| 102121 | atagaccagg tactggtgag cccttggatg gtggtactgg tagaggaact gcaggaagaa |
| 102181 | aaggtaaatc catactcaga atatgtgttg attctggtaa ggacacgttg cttttccctc |
| 102241 | caagacagat ggttccgata gatggttgtg tagctaccct ccctgaggaa cggtactatg |
| 102301 | tcaaggtctt ggcatcagat tccgtggctg acaggttgga aatttagcat tgacagtagc |
| 102361 | tgaattatct tttgtaagtg ggagctcaaa tatgaccatg catagcacca tagtgattgc |
| 102421 | agcactagag acactattta tgggctttcc tgcacaagaa ctggggtggc taaagacggc |
| 102481 | ccggctaaaa ggcaggatgg atcatcctga gcacatggtt gttgagagtc ttctttgcag |
| 102541 | tcgggcggta gtgtgagatc tgctttgtgt ttatttccgt agggttgtcc acatacattt |
| 102601 | ttttccccac accttttctc tgagcttcaa atcttttttt cttgtcctgt cgaaatggcc |
| 102661 | aagccattca ctactgctta gaagccagtg catacttaag gatctggtct tttcttccat |
| 102721 | atgaaatgaa taactaagtg tgttgctcat agttttcccc actgggagga tttcccttta |
| 102781 | cctctcttct ttggggccac ctcaagtgag gatgaaatgc aacagcagac tatctctggc |
| 102841 | tagaggcaat aaatcacact agcccaatta tgcaccaggc ctgagctgtt tcctccacta |
| 102901 | ctgattgttt gtaggtagca gttgtgggag cttctgtgga acagattcag gtggtacagc |
| 102961 | tgctcaaact cataactcac ctgcaatgtg ttctgaaaat gtgtggctta actgcatcta |
| 103021 | ccctaaaaga acaagttggt gagtgatgag atgagtggga agtagtgagg atgacctgga |
| 103081 | ttttccattg aggaagtggc caagtcctgc ggacaaattg tacctaggaa aaggtacaaa |
| 103141 | aacaggagaa tggatcatgc gttcagtatt ggaactgatg actattaagt tgctgtgggc |
| 103201 | atctgaatat agatgttgtg atggttttaa aacatgtctg aaaattcttt gacactgttt |
| 103261 | ccatcaagag gtgatgtctt tgtctcctcc ccttgaatct aaatgggcct ttgtgacaga |
| 103321 | tctgatgaat agaatgcagg aatgtgatgt ccaaggctag tttagaaaag accatgtttg |
| 103381 | tttctctgga gacacttgct ctgggagcta ttagtgtcct tccaccaaag ccccccagga |
| 103441 | acacccctgc agctaaacaa attggattta ttgcttattg tagcaagaca gaacattcac |
| 103501 | cagggggaac cataggttat ctcagtaaga gggttttaga aagaacctat tataagattt |
| 103561 | gggctttggt tgggtgattt gggggaaggt ttaaggaatc aggggtggcc aggcacggtg |
| 103621 | gctcacgcct gtaatcccag cactttggga ggccgaggca ggtggatcac gagatcagga |
| 103681 | gatctagacc atcctgacta acacggtgaa accccgtctc tactaaaaat tcaaaaaatt |
| 103741 | agccgggcgt ggtggcgggt gcctatagtc ccagctactc aggaggctga ggcaggagaa |
| 103801 | tggcgtgaac ccaggaggcg gagcttgcag tgagctgaga tcgcgccact gtgctccagc |
| 103861 | ctgggtgaca gagcgagact ctgtctcaaa aaaaaaaaaa agaaaaaaaa aaaggaatca |
| 103921 | ggggtttggt ctagattgaa tgctctcaga aaatgggagt aattctaggg ttgtatattt |
| 103981 | tataggtggc atagtgacct tgttttgtct gtccttacac aaatgatgaa gtaggctgat |
| 104041 | tttgtttcat tttatcttgg tcgcagagta actttgtctg aggttggtgt tctataagat |
| 104101 | tgtatatgtc caacaagaga atgacatggc ttagctgtga atgtcagatc agttctggat |
| 104161 | atgagaggct gatattttct ttttgagctt tcagttgtca tgtaaggagt gtggctacca |
| 104221 | tgaggccact gcatagagtg attgtatacc tatatataag agagatggtt tggagttcaa |
| 104281 | gcccccagct agtcaagtct tcccagccca ggagacagat gttcgaatga aggagactta |
| 104341 | ggtaatttca gccccagtca ctgtctgacc acaactgcat gagagaccct gagggagaac |
| 104401 | tgctttgctg aacccagtca acctccagat ttgtaagtaa aataaatggt tatcattgat |
| 104461 | tgaagtcact gttctagggt ggtttttcct acagtaatgt cattgataca ggtgtctggc |
| 104521 | aggcagttgg ctctagaggt ctggagctaa ggagaaagat ctggcttgga gatgtggatc |
| 104581 | aggaagtcct tttacaagga gaaaagtgct tgaagtcatt tgagtggatg acatcacctg |
| 104641 | aaagataata tacattgaga aagaaaaaaa taaaaagcca acaatagcac ctttagtaac |
| 104701 | aacactgaag agagcaggaa gaaataaaga aacatttgca aggagacaga gaaggagtga |
| 104761 | ataaggtgat caaatggcat ccatccaaga gatgatgtcc aggaagccaa gaatgagagt |
| 104821 | atttcagaaa gaagagtgtt gtccacagag ttaaatgcta tggagagaga tggagtaaga |
| 104881 | caagattgat tagcaccaat gagctttcat tgttgacaaa tgcagtttga gggaaactgg |
| 104941 | gggctaggga gtgatggggc agagaccaga atgcagtggg gtaaggaggg gtaagaagat |
| 105001 | gagaagaatg ccaaatctgt gctgtttgcc acatcatggg ccctctctcc atactattta |
| 105061 | tgtgtgtata atttttttct acaatttaat aatgcattaa accatcacat cacatcacat |
| 105121 | cacaaaccca acaattccac aatagcatgg gtagatcata ccctggtgta tttttaatgt |
| 105181 | tatactttaa ccggtagttt tgagtcataa atgtactact atgttgttgg tttttttttt |
| 105241 | ttttttgggt ctgtcattat agtaataact ttaaatctct tattgtttat ttctcttgca |
| 105301 | attaaaatag ttcatcattt aaaatagtac ccagtgttca gtgtccattg gtgccttgta |
| 105361 | attacttcag aaaaacagtc tcagtttaaa agttataaac tcttaatgcc tctctgcagg |
| 105421 | aggaatagct tccttctgcc agagcggtct ggggagcatt attctagtca taccctgcta |
| 105481 | attcattggc ttgattgtca ggggtcctga tctagttcac cctcctggga ggctggtgtg |
| 105541 | ggaccctgct tatcccagtg ggggtcaagg cctccttgac aacagtgaat gggttgctag |
| 105601 | gaggctgcgg aaagaaattt ctctagttcc atccacaagt agatcccact gcagtggcct |
| 105661 | catttggctc ctctaatcct ctctttccca ccttctttca gggcaagtct caccctattt |
| 105721 | tcttcattac ttgcttgtgg tttccttgcc ggagatgctt ggaggcaagc attatgacaa |
| 105781 | ggatgggcgc gggtgggagt aaggccttta aacgaagagc tacatttcaa agaacttcaa |
| 105841 | atgtgtattt caaatgtcac ttccaaatga ggttgtacac acagacagaa acgcaattaa |
| 105901 | cagatttgga agaggccacg tagcatgcat ttgaaactcc tgttgcattc cttggctatt |
| 105961 | cttgtctgtg gcatcttttt aacaaatcct gtagttacct tgtaaatacc atcatagaat |
| 106021 | atattgtatt taaaaaacat tctttactca gatatgaaag ttgaaaaggt actattattt |
| 106081 | ttaaaaatct gtattggatt tttttttttt catattttag gatgccagaa gcctcaaaaa |
| 106141 | tggaaaaccc cctgtgcttc acatctgaaa atctctgctg ggggcagcaa ctttgagcct |
| 106201 | gtggggaagg aactgtccac gtggagtggt ctggtgaatg cttaaggagc tgcagaaggg |
| 106261 | aaggtagtga ggagacagtt aaatattgag cacgttttgg tgcctagcat tgtactggcc |
| 106321 | tttcacatgc tatgtttaat cacgcaggat tgtatggaat gggattgtac agaatgaggc |
| 106381 | ctgggtttgc taaatcctgg gggagattgt ctaagcbgtc acttgaaggg aaaactgtag |
| 106441 | catgbgggac ttaaaaacag cttgggatgg agtttgaggt agggcgagag ggaaaaagat |
| 106501 | cttggcagat acattctgaa caaatacttg tgtcatcctc aactgtatag tttttatgac |
| 106561 | ttttcctgtg ttcatctggt tggcagatga atgcaaaatg ccttttagct tcatggaagg |
| 106621 | cacacatgaa tcatggctat gtgataaaca gaagaagcca cgtttcggag ggtttctggt |
| 106681 | gtgtgtacgt gtgcacttgc atgtgtgtgg gcacaccctt gtgccaaatg gaccaccagt |
| 106741 | ttaaatcgat tttcaacagg gcagatttca tatgcttctt tagtgtggcc caagtcaatc |
| 106801 | tatttttaga aggggaaagt agagcatgtt ctgaaagttc ttttcttctg ccatcaggga |
| 106861 | ttgtagtact ttttatttat agtaatttca ggtctctaaa tacttcaagc aaaattaatg |
| 106921 | aggcaaacaa aaaaaattag gtaccagata attggatcat gtgttatttt atagagagct |
| 106981 | ttatttatct tgcctttgga aagtataatt tgtatttttc aaaattatga ttagatctaa |
| 107041 | ttctttttca agatttactt aaaataaata tttctgccta ggcacaagac tgtgtatagc |
| 107101 | acaactggcc ttgtattatt gacttgatga tgcaaagaaa aatatataag aatcagtttt |
| 107161 | ttttaaatgt gttaatattt atcataatgg aaatagtctt actaattagc aataactaga |
| 107221 | aaaatgtcta ctatttattg agccactact atatgccata ttctttacct atgttcattt |
| 107281 | tctcttctat attcaaaata atcctataag gtgtgcttta tgatcaccat ttgttccaat |
| 107341 | agggtctcaa ggacgttagg taattattcc tatgacattg agcctatgaa tggcagagct |
| 107401 | gggagtttga acctaagtct gatgactctg aagcttatag tctttctata agcttcttca |
| 107461 | gtctgaagct gcccctcaaa gtcatggcaa taactgagaa tagcattcag ttttacagct |
| 107521 | aggaaggtag ttgtagttgt gtttattatt caatactgtc catattcaaa gaaccattca |
| 107581 | ttgagcttct attttactcc agtcacggtg ataaataatg cagaatctag agatcaaaga |
| 107641 | taaaatggcc ttgccctcaa ggaacccatg agctagttgg gaaaactaat aggaatatta |
| 107701 | atgattataa tgcagaatgt taggtgcaat gagagaggta acaaggtact actggggcct |
| 107761 | gacaaaggcc accgtttctg tgtgtgtgtg tgtttatgtg tgtttgggaa aaggcaaaag |
| 107821 | acacttgaga taaagggaac aacatagaca aaatcaaagg cttgagagca tataacttat |
| 107881 | atgagacata gcaaattgtt tgctttaact agaaaatagt ggttatgtgt ggcagactat |
| 107941 | gagaaatgag aatgtaagtc cttgagaatg ataactttag aaattctaca tttgggatga |
| 108001 | tcataacctt ttaaaattgt ctcaatatga tagatatttt ccttctgttt tggggtatct |
| 108061 | gtctttttat tttttatttt tttgaggtgg agtctcactc tgtcacctag gctggagtgc |
| 108121 | aatggcgtga tcttggctca ctgcaacctt cacctcctgg gttcaagcaa ttctcctgcc |
| 108181 | tcagcctcct gagtagctgg gattacaggc gcctgccacc atgcctggct attttttgta |
| 108241 | tttttaatag agatggggtt tctccatctt ggccaggctg gtctcgaact cctgacctca |
| 108301 | gatgatccac ctgcctcagc ctcccaaagt gctgagatta caggcatgag ctaccacgcc |
| 108361 | tggcctgggg tgtccatctt ttaaagacac actgtaagaa tcataatatt ttcccaaaga |
| 108421 | agaaatgtaa ttagtacaca attacatgtt aaaactaggt gttattggta attaaaattt |
| 108481 | aaaaaaatta acccaaccaa ataataaaac taatgaaaat atttaatatt ggtaagaaca |
| 108541 | agatgcgata agcatatttg tgttttgctg attggtctat aaagtggttc aaaacttttg |
| 108601 | taaactatat ataagctatt ttaaatgttt atgccctttg attcaatagc actaggtttg |
| 108661 | gtactttata ataggaaagt tattagaaat atttactgca gggtttcttc aatgatgagt |
| 108721 | tgtaagaatc agcctaagta gctatggtac atcactttga tgcaacttaa tgtgtcatta |
| 108781 | aaaatcatgt ttatgaataa cattccagat gcatttaata caattctagc tgaaaaaaag |
| 108841 | atactgaaac attttgtgtt tatatatgtc tgcatatgta tctatatata tccctctccc |
| 108901 | tgtcaatcta taaattaaaa actatacatt aaaaactgca aattaaaact atatactaaa |
| 108961 | gaaagaaact ggaaagaaat ccacagaatg ttaataatca tggtcattgt gttgagtggt |
| 109021 | aggactatgg gtaatttttt ctttctattt ttatacattt ttcacttttt tttttttttt |
| 109081 | caatttgagg cagagtctca ctctgtcacc caggctggag tgcagtggaa cgatcttggc |
| 109141 | ttactgcagc ctctgcctcc gggttcaatc aattattcta cctcagcctc cagagtagct |
| 109201 | ggaattacag gtgcacacca tcacgcccgg ctaatttttg tatttttggt agagacaggg |
| 109261 | tttcactatg ttggtcaggc tagtctcaaa gtcctcccaa agtgctgggc ctccaaaagt |
| 109321 | gcbgggattt ggcctcccaa aatgctggga ttacaggtgt gagcaccaca cccggcccat |
| 109381 | ttttcacatt tttaatgatg tttttaactt taaaagtaaa aatttgtaat ttaaaatttg |
| 109441 | tttaactttt acaaataaaa attacaaatg caaattaaaa ttgctatata tttttgttac |
| 109501 | tggacaagaa aagatgcatt atagagtctc gttttatttt gttttctgat aaatctattg |
| 109561 | ctggggagca tgtgcgtaat tcgttttaaa aattctcagt gttaactaga tttcttttgg |
| 109621 | gatagctctg ctgaactgga atgagatctt cttccccaga gccacttgct agtttgattt |
| 109681 | tctagaaaga gagaaattat agaaagctac aatctacaaa ttgctatgta ctacagtcta |
| 109741 | ctaaatagta taatacttta ttttgcaaac tatatctctc agagtacaag gctccacagc |
| 109801 | tagtcttgca ccaaatatat gaggttcttg aatagtcatt ttctcaaagt tctcatctct |
| 109861 | ttacaaagca agttgagggg ggaagcagag agagcactct ggtgcttcca aaagcatcag |
| 109921 | ccatccacac tctgcctatt gaaaacacca aatctgagca tgtgtgtcat tgtccaggaa |
| 109981 | taaacaatca caaaaaggca tcaatgaggc ctataaaaac aagagcgcat gcaagaagat |
| 110041 | gggattgtta tgaaacagga gcacaaggct actaaaagag ggcaagccta aaggaaaagt |
| 110101 | caccagggtg agatggaaat agatatagga agaatagtga acggtggcaa ggaagtaaag |
| 110161 | gaatacaaaa gtaataaaat atccattgca ttagtccgtc cttgcattgc tgtaaagaaa |
| 110221 | tacctgagac tggataattt ataaagaaaa gggtttattt ggtttatggt tctgcaggct |
| 110281 | gtatgagaag catggtgcca gcatctgctc ctggtgaggc ctcaggaagc ttctattcat |
| 110341 | ggaggaaggt gaagggggag ctagcatatc acatggtgag agatggagtg agagagagag |
| 110401 | agaaagagag agaggagatg ccagtctttt aaataaccag atcttatgtg aactcagagt |
| 110461 | aagaactcac ttatcatgag gacagcatca agacattcat gaggaatctg accccatgac |
| 110521 | ccaaacacct cccactaggc ccacctccaa catgggcagt cacatttcaa cataagactt |
| 110581 | ggagaggaca gaacatccaa accatatcac ccacattgag ggagcaagga gcagactcca |
| 110641 | tactgcagaa cacacatggg aaacaaactt gagaagtttc cccagggcat agggtaagag |
| 110701 | gacgaggggc tggaaaaaga aaggtaatgg atatagagga cagagaatgg agttcgaaga |
| 110761 | tacatctaag aactttacat attcctaagg aacccacaaa gataaaacaa acagagcaag |
| 110821 | tatgaaagat gtaatagaag caaatgaccc tgcattgaaa atgatcaaag tatgcagatt |
| 110881 | ggaaaggctc acaaattcca ataaaaagaa ttgaaaacaa aaaaaaatgc tgcaataaca |
| 110941 | ttctttaaac tatattaatt gtaaggtttt tacaaaaata agtactcagg cagtagtaaa |
| 111001 | aagtttgcga ataaagaaac caaaattaaa ctctaacttt tcttatgtaa taccaaattc |
| 111061 | cagaacttgg aaacatatct gcatgcttta ccagggacca gattatgagg cagttattta |
| 111121 | agattagaaa agttctcttt cattggtaaa ggcaacagaa agatatattt tagaggtaga |
| 111181 | agctctctaa catagacact attctgccaa aaaaaaaaaa taagataaat gtaacaaaat |
| 111241 | aaaatgagct tcaaggtgta ttttggtcac tgagagatga ttcaaaagaa gactttgaac |
| 111301 | aatgagaatg ttaacattta aaagaatagg tggaattttt ccttactcag tttgttcaat |
| 111361 | aaaatcatgg gtccactgta acctgatata tcttgttgct taaagggaaa gcttggccct |
| 111421 | accttttctg ctttcttctg tgttcatggt gtagaaaatg tatttttgtt aaccaattat |
| 111481 | ttacttcaca cttgaggtag actttgttgc catgttggat ggctattttg ttaggtcaaa |
| 111541 | cagttttctg ccacatgcct atgtgatttt aaataatgta gccctcaccc tgagcttctg |
| 111601 | ctatagggac cacatgcttt gtggtaacca ggtgctgcca aaattggatg atagcaggct |
| 111661 | cctgacccat gcctgtcaag tcataggtgg ttaaggtcat gggagttgga gtcagactgt |
| 111721 | ctggttccaa atccaaggtc taccagttga ttttgacctt aattttctta ttctgtaaaa |
| 111781 | tgagtttatt gattgttccc actcagttcg tttgaggtga ggattaaatg agttaatacc |
| 111841 | tgtaactttt tgactggcac aagacacaat cctattacat gttctgaaaa aaaattctct |
| 111901 | acatgaacca aaggaatgaa ttctatttcc tccactgcta ctacaactca acacttctaa |
| 111961 | tcaccaaatg tgtggaggtt tttctacatc agtttgtcag acacctacta tgtgtcctat |
| 112021 | aattcagttc agttctgaca ccatctacat ggaaacaaca tccgatccca tggactaaaa |
| 112081 | gctcagtctc ataagactgt ctataatggc tcaagtgggt tcttcttgcc tgctgcacag |
| 112141 | aaaaaccaat acatcaaggc agtggtgttg cagtagagaa agcatttgat aatcacaagg |
| 112201 | ccagccaagt ggaagcatgg gagataattc ttaaatctgc ctccccaaga gctcaggggc |
| 112261 | tagggttttt aaggataatt tggcagacag gggactaggg aacgagtgct gctgatgagt |
| 112321 | tgtggatgaa atcataggag tatccaaact gtcttcgcat gctgagtcag tttctgggtg |
| 112381 | gaagtttctg cgtgggagtc aatttcttgg catgagtcac aggtccgggt ggagtcagtt |
| 112441 | agttgccaga atgcgaaagt ttaaaaatat ctcagagacc aatcttagat tttgacaata |
| 112501 | gtgattttat ctataggagc aagaggggaa gttaaaaatc ttgtgacctc tggctacatg |
| 112561 | attcttgagc agtaactatt atagaaaggt aagctaggga acaatgtctg gttatcattt |
| 112621 | aattacacct acatcttagc agaatttaag ttcttctcat aagcccaacc ttgtggactt |
| 112681 | tcattagtct tacaaaggca gtttcagtcc cccaccaagg agggcattag tttcaggtag |
| 112741 | ggactgttat catctttgtt ttaaagttaa aaaaggcagt tagcttgtga tgttagaaga |
| 112801 | aagatgtcag atttctctca ctgtcataat ttttgcaaag gtggtttcat ggccccactt |
| 112861 | gaaatgagaa tgggaagtcc aggttttcac ctgtgcttta gactgggtgg agataaatta |
| 112921 | aaggttcaca ggacctcctc ctcagatttg accatttgct agaatggttc acggaactca |
| 112981 | gaaaaacagt ttacttattt gattaccagt ttactttaaa aggaaattac aactcaggaa |
| 113041 | gagccagatg gaagagaggc atagggcaag gtatgtggga aggagcatga agcttccgtg |
| 113101 | cattcttggg ctcatcaccc tctcagcacc tccatgtgtt cagcaacctg gaagctcttc |
| 113161 | gaaaaatgtt cttaagccag gtgtggtggc tcacacctgt aatccccgca cattgggagg |
| 113221 | ctgaggtggg tggatcatct gaggtcagca gtttaagacc agcctggcca atgtggcgaa |
| 113281 | accccgtctt tactaaaaag agattagcca ggtgtggtgg cacatgcctg taatcctagc |
| 113341 | tacttgggag actgaggcag gagaattgct tgaactcagg aggcagaggt tgcagtaagc |
| 113401 | caagattgtg tcactgtact ctggcctagg tgacagagca ggactccgtc tccaaaaaaa |
| 113461 | aaaaaagaaa gaaaagaaaa agaaaaatgt tccttcagat ttttatgagg gcttcattgc |
| 113521 | atatacatgc ccctccctgg aggttggtct ggaggttggg ctgaaagttc caactctaac |
| 113581 | cacatggttg atttccatgg caacagccct gcttatcatt agggacttcc caaaagtcac |
| 113641 | ctcattaaca caaactctgg tgtgactgaa taacaaaaga tgctcctgtt acctttattg |
| 113701 | ctcttagaaa attccaaggg ctttaggggc tttgtgccaa aaacaaacac tatatatatc |
| 113761 | ttattataaa tcacactatc tcacattatt attatttaaa atgataagtc agtcaagctc |
| 113821 | tcttttcttg agaatttgat ttgggaaact tcgagaatga ggcaaggagc agtgggaata |
| 113881 | ggagtttaaa gtaagcatag aaagcataga aagaagctag ggaatagatt aaggttgcaa |
| 113941 | ggagggataa caaatggaga ttaggaaata gtggagactg tgattaagca gagcctgtca |
| 114001 | ttaggcattt ctgatataaa cccagatgct gtcatatcac ctcactgaat gcttgccctg |
| 114061 | aaacacttgt tttagtgcag ataaattcat cacctaagga tggcttatcc tttctatggc |
| 114121 | cattgaactt aagagctcca ctaaatagga taactccctt tatgcbggga aatctaccaa |
| 114181 | aattacctgt gtcagaaggg taagaaaaga gaatccagga tccagaatgg gattgaagtg |
| 114241 | atctcccatt ctttttgtga tatttagact gccttctgcc tctccaatcg acagaataaa |
| 114301 | gaccaaactt ctacccgggt gggtagggct tatcctgagg atggagactt tctaagtata |
| 114361 | gatggtcaag aaactggtgc acatttaagt tagacgcatc tctaaattgt ctgggcttag |
| 114421 | actattctaa gaatgaataa ttatgaaaat tgaggcagct cagagactca ttttctaaga |
| 114481 | tttcaatata tgattagcaa agtgctatag aaaaaaataa aatggcacag tttggcagtt |
| 114541 | ggcatcttgt atctttctgt cccaggtctt tcttgtgctt gtaattcttt cattgataaa |
| 114601 | gaactcagct atctatccag gcgtgatggc tcatgcctgt tatctcagca ctttgggagg |
| 114661 | ctgaggcggg aggatcactt gaggtcagga gttcgagacc agcctggcca ccatggtgaa |
| 114721 | acccacatgg tgaaacatct gtactaaaaa tacaaaagtt agcbgggtgt ggtggtggga |
| 114781 | gcctgcagtc tgagctactc aggaggctga ggcaggagaa ttcctcgaac ctgggacttg |
| 114841 | gaggttgcag agagccaaga ttgcgccact gcactccagc ctgggtgaca gagcaagact |
| 114901 | ccatctcaaa aaaaaaaaaa aaaaggattc agcaatgtgt ggttcttttg aatctatggt |
| 114961 | atgtattagc acatcacagc agagcagagg ttctcaacaa ttgattttat tccccagggg |
| 115021 | acatttggca atgtctggag acaattttgg aacttagagg ctgatgctat tttggaactt |
| 115081 | agaggcttag atgctattgg tgttgtgggc agatgacaag agagattgca aacgttctcc |
| 115141 | aattcagaag gcagcctcca caaaaagaat tattcagtcc aaagtgttaa tagtgctgtt |
| 115201 | attgagaaac catgccctag agaagcagcc tagaactttg agtttttcct tttttttttt |
| 115261 | tcaatcaact aatgagaata aatgtggagg agacgggcaa aaatgtcagc agccccgtat |
| 115321 | ggttttcaaa atcatttcag atatttgcta ttcaccagtg tcagccaatg tgtttatttt |
| 115381 | tgaaaggtca gaaatttcat agggccagat tactaaaatg gttattatta tttttttgtt |
| 115441 | ttcaagagct tatgttagtt atctagtata gagaagtcta ccatagagat ccctttgttc |
| 115501 | tgagtactgg actttttcac ttaccaaaac tctcctactc tatacgttct tcaccgtgat |
| 115561 | aatccaagaa gtctgaatcc tccccatggc tctcccctgt ttccatcccc agtcggtggg |
| 115621 | tttcccacag gtctccagtg tgctttggaa gtaggaactc ctaacagatt cacagtttga |
| 115681 | acatggtagt cctctgagct gttcagtatt ttaaatctct ctgcagttag ttataatcat |
| 115741 | tcaactcttt tagtcattct tctaatgtca gtatagataa ctaaaagatt gtaatattag |
| 115801 | aagacctatt tcccagagac cacaaagaca atctcatgga agtcccactg tagtaaatag |
| 115861 | agtctatttt ctacccagca tctggtagag taattcagac atgtgttttg acagtttgcc |
| 115921 | tgaaagtaac ttgacaaata attttactaa agaatcctag aaagtcaatg gcaacatttt |
| 115981 | gttcattcta agttgttcaa gccacgtcct tagatgtggt tgattcaaat ttcttcagaa |
| 116041 | ctggaaaagc acaagagaat tagtattcca gtaataagga atcatggatt gtggcagtct |
| 116101 | ttttaaaaca taaactagtt tagcacataa gtggtggcct agtacatttt aaagtggagt |
| 116161 | ccaagggaag tttcttgaat tgctgtagtt cttatggtgt tctgctgaag ccgtgtagat |
| 116221 | cttatggtgt tctgctgaag ccgtgtagat attgatcatg ctgcctccca ccaccacccc |
| 116281 | cttcattcca gatctgctca aagacaactt agaaggtcct atcctggtct cctgtctgaa |
| 116341 | acatatactt tctctcctcc cgcccccagc ctgcccatac tattccaatc cttctctacc |
| 116401 | tattattcct ttgttttgtt ttcaatataa aaatcttatc tatttcttta tacgttaatc |
| 116461 | atctatcact ccccacacac tacaatgtgt gcattcattc cctgagtaac tgaaacctag |
| 116521 | aggcccggga gtcatttttg aaacttcctt tccttggctt tctcctctaa ctgctcttcc |
| 116581 | aattcatcgg ctggatttga ctattctaat tccaaatctg tctggaactc gtgtacctct |
| 116641 | cgcagtgtcc actgcbgttg ttctggtctg gggcacaatc gacactcatg ctcaccgaac |
| 116701 | tgcagcagcc cccttcctgc tgcttatttt gaccacacct ctttttgaac ctattctgta |
| 116761 | caaaggagct ggaaagagtc agtaaaaata cagagcatag tgttcattgc cttgcttgga |
| 116821 | caggacctgc catatgtgtc ttctctatag tattggctga atgcataaac agcgagaaat |
| 116881 | aaatgtgtag agagtaaatt gatagaaagc tgccctcagt catctcccat ggagagggct |
| 116941 | agtgatgact ggcgaaggtc acagagctac tatgtgttag attttggact aaaatccagt |
| 117001 | ttttctgaga acggtcaaga gtttatttat agaaaacatg ctgctttatc tcttaattcc |
| 117061 | ttctcactcc ctgcaaatta gtggcatttt agtttactta aatgcacaat tatttttaat |
| 117121 | tttgattgaa aaattaatac tcatttactt ctgaaaacta tttctttacc gaagagcata |
| 117181 | gagaaataag ggagtaattt atcaacctac cataggtgga atttttactt tcatctttat |
| 117241 | actttcttct tcattattgt tttttttaaa aaacgtaagt atgcatttat ttttataatc |
| 117301 | aggaaatatg tgaagttata taaatgtgta atgaatttca ttactgggaa ctaactgctg |
| 117361 | gtgatatttt acacttgatt ttagccaaaa ggccgagaag cgatgctggt gatattctaa |
| 117421 | tgtactataa cttattctaa tatttcatgg gatttatttg caattagtgt gatataaatt |
| 117481 | tccataatgt atggaaagat atattagaag atgctaacca tgggcttaag aaagtagatt |
| 117541 | tcataatttg aaacacggcc cacacaatta ataaatataa gacatttggc actctacttc |
| 117601 | taatctcttg atttttttta tagcaactgt ctttaagaac cccagcatat tcatggattt |
| 117661 | tttagaaacc taattatttc ctagaaaaat cctttgaaaa aggaaaatta tatttgacag |
| 117721 | ttttctaaag attttctgtg cagaagttgt atctggatat acatataaag ccctgaagta |
| 117781 | atctatacat tttatcgctg gtcttcagat atgttggcag agtcgctcgt gaaatatatg |
| 117841 | cttgaaatta atgtaattac tctgacattt gttattttaa taagcattct tagctaatac |
| 117901 | atagaggaat acattaaagg aactctaaca ccaaaattat cctttcttaa ttaaataaga |
| 117961 | aggactgcaa ttatttaaaa agtgtatgtc aaatctaagt tgccttcaaa tgtaatttaa |
| 118021 | ttttctgtta cttacatttt aaaatggcca tagctttttt cgttgttcat ctttcttaat |
| 118081 | tctttaggca ctacttaccc cccaactcca gcaaccaaaa ttaatcctaa tttgcatcac |
| 118141 | aataatttaa aatagatcaa agaaccaatt tcatagccta attcaaaagc atcatgcgac |
| 118201 | caatatgtag tattaataaa acatatttct ggttttgcca atccaatttt ttttttaatt |
| 118261 | aagtgcttaa cacagtgccc agcacagaaa aagcacttga tacatgtttg gtaatgtctt |
| 118321 | tgtgactgtc atttttacta atgttgtata ttggtactac taaagtctaa tgggatgctt |
| 118381 | gtattatggt gtgataatat agttaggatg accacttgtc atggctggcc tgtgagaatc |
| 118441 | ctgtttaata tctattgttc cagttttctc caacttaaca ttttagcact caaaagtatg |
| 118501 | tgatgtggag gataaatttt atggtcgcca atcctttatt gtaaagaatc gtgatgcaaa |
| 118561 | ggctccagtg tagtcatcac tcatctcttg atttaggcat ctaagctatc caggcatcat |
| 118621 | catgggggtg agcagcctga atgacagtaa gctttccaag tatggggaca tgcacttaag |
| 118681 | ataggtatag ttattccagt gccaatctcc tcttacctgc tgtatgtcaa gaatcaggca |
| 118741 | acatttagga aatgaaacca caagtctttg tctctttttt taccctttat ctcaaaatgg |
| 118801 | tttttacttg ggatttgttt ttttgttttt tgttttttgt tttttttttt gagacggagt |
| 118861 | gccgctctgt cgcccaggct ggagtgcagt ggcgcgacct cggctcactg caagctctgc |
| 118921 | ctcccaggtt cacaccattc tcctgcctca cctcccgggt agcbgggact acaggcgccc |
| 118981 | gccactacgc ctggctaatt ttttgtattt ttagtagaga cagggtttca ctgtgttagc |
| 119041 | caggatgatc tcaatctcct gacctcatga tccacccgcc tcggcctccc aaagtgctgg |
| 119101 | gattacaggt gtgagccacg gtgcctggcc tttagttgag atttgattat gaatgaaaat |
| 119161 | gtaaagaaat ttgctagatg tgtccatctt ttcatgtggc agacaatatg gactagatat |
| 119221 | atggtggtca aaattatgtt tgtgggtata gcctaatagc ctaaaccaat gacacttatg |
| 119281 | tggcagtttt atttatttat tttttctttt taagacaggg cctcactctg ttgcccagtc |
| 119341 | tggaatgcag tggtgcaatc tcagctcact gaaacctccg cctcctgggt tcaaatgatc |
| 119401 | ctcctgccta aacctcctga gtagctgaga ttacaggcat gagccaccat gcccaactaa |
| 119461 | tttttgtatt tttagtagag atggtgcttt accatgttgg ctaggcttgt tttaactcct |
| 119521 | gacctcaagt gatccacctg ccttggcctc ccaaaatgct gggatagcag gcgtgagcca |
| 119581 | ctacgcccag cctcaccctg gactttatga caatgccaaa tatatgcact gtgtcaaaaa |
| 119641 | cagtcctctt cactgtcctc cagtagaaaa agctcaataa tgggtctaca aactcctgga |
| 119701 | tttagtccag gctatgtaat ttgtggaact tagtgccaaa agtagggtcc tttgttcaaa |
| 119761 | aattattaag aatttccaga tggcaacagt ggaacagtca atgaagcaca ggatccttct |
| 119821 | gtccccaagg tcctgaacaa ctgcagaaac cttgtgcccg tgcattcatc cctccttctt |
| 119881 | ggatccttta cctgttgatc tccttcgttt tctttccaga caacaattat ggacaactta |
| 119941 | ttattaatat atgtgagcca ctgtgttcac tatcggaaat aaaaatatgc ttataaggta |
| 120001 | gtcccaaatc tttttttttt tttttttttt tttttgagag acagtctcgc tctattgccc |
| 120061 | aggctggagt gcagtggtgc gatctcggct cactgcactc tccacctccc gggttcaagt |
| 120121 | gattctcctc ccgcagcctc ctgagtagct aggattacag gcgtgagcca ccactcccgg |
| 120181 | ctaatttttt gtatttttag tagagacagg gtttcatgat agtggccagg ctggtttcga |
| 120241 | actcctgacc tcatgatccg cctgccttgg cctcccaagg tgctgggatt acaggagtga |
| 120301 | gccactgtgc ctggccccag atcttagatt ttggtgatta aggacttcac gaagtagatg |
| 120361 | aaataacacc cagaatttgg ctggtttatt ttctccttaa gatgctcagc tgtgattttc |
| 120421 | tgtatattag tctcaagctg caaattctct attccaggat cttatgatct gtgtcctaac |
| 120481 | tacatattat agggccccag tggtccctat gcctctggtt ctattgtcat cacacacttc |
| 120541 | ctgtttcatt cctatagaca gatttattca tgactaggga acagattatg ctagtaaagg |
| 120601 | tgttggttaa catgagttta aggcaagaac ttaaacgtaa atatctctag ggattggaca |
| 120661 | ggcaatatgc cttaaatagt aaagctatca ggtagggatt gactgcatgc ctgcagagga |
| 120721 | aactgctgcc tatttagcca cagaagatta ttgccatgta aaaatgtgag tatggtttgt |
| 120781 | cacatatttt taaagaaaag tcagaaatcc aaaaatttgt atgaaatttt taaacatttt |
| 120841 | atattgtcaa ttcaattttt aaaaagactc aatataggca gagaaaaata actacagccc |
| 120901 | aaggttaagc caagaagtat tgtttttcta ctttttcttc gtagtcagat ttgttcagat |
| 120961 | ataattcaga tgtaataaat aaacccttta agttctatga gttttaacaa acacctacat |
| 121021 | tagtgtgaca atcactgtag acaagatata gaataattct ctcgtctccc ctccaaaatt |
| 121081 | ctctcaagcc tctttgtggt taattctcct agctcctgac aatcgctaat aaatttcctg |
| 121141 | tctatagttt tgccttttca agagtgtcaa ataaatggaa cactactgta tgtagccttt |
| 121201 | tgagacaggc ttctttcact gagcacaaat aatttgactt attcacgttg ttatatgtat |
| 121261 | ttagattgtt tctatctaat tttcaaaggt tttttccttc ctttcttctc ctttcctccc |
| 121321 | tccttccttc ctttcttttt ttcttcttcc tccttttatt ctgccttttt tctctccttc |
| 121381 | caactttccc gcttttttag atatcacatg tacagaagta gattaatctt gatgtttatt |
| 121441 | tcataacata ctctcatttg ggcccatgca tggcttgtat ttcaatagct ctattgagat |
| 121501 | aaaactcata tacattcaca tggagaaaca gccctgtgga gggaaagaaa ttgatatgca |
| 121561 | gtaaactaca catactcatt tacaacttga aaagtttgcc atatgtatac acaatgaaac |
| 121621 | catcaacact ttcaaggtaa taacatatct cagtttcctt gtgtctttat gttattcttc |
| 121681 | cctccttcca tctgatctgc tttgtgtcac tgcattttct agaattttat gtaaattaaa |
| 121741 | tcatatagca tgtgctcttt tttttgtctg gcttctttca tgcagcacaa ttattttgcc |
| 121801 | attcatatca gtttttgtgt gtatcaatag ttcattctgt attattacaa attagcattc |
| 121861 | aattacatga atacattgca atttattcat ttgtgaatgg acattgcatt atttccagtt |
| 121921 | ttggctgtga caaagattca tgtggaagtc tgtataggga catatgcttt catttctctt |
| 121981 | gggtaaatgt cttagagtag aatgcctaag tcatatggta gatgtatgtt taacttttaa |
| 122041 | agaaattgcc aaattgttgt ccaaagtgtg taccatttta cattcctggc agcagtgtat |
| 122101 | gagagttcta gttcttcacc atcccccttc caacacttgc tatagtcagt cttgcaattt |
| 122161 | tagccatttt aataaatgtg tagtgatatc tcactgttgt tttaatttgc atttccctag |
| 122221 | tgtctagtta tgttgtgtct ttacttttgt ttatttgcta tcattatctt ccttggtcaa |
| 122281 | atatctgttt aataattgat acatttttta ttggactgtt tgttttctta ttagtaactt |
| 122341 | tggagagtgc tatatatatt ctggatacaa atcctttaac aaatgtatga tttgcaaata |
| 122401 | ttttctccca gtctgtgatt gtcttttcat tctcctagca gtcttttgaa gagcagatgc |
| 122461 | tcttaatttt ataaagttca ctttatgttt ttttttattt tgtggattgg acatttggtg |
| 122521 | ttatatctaa aaaaaaatct gcctaaccca tagccttatg tgttttcttc tagaagtttt |
| 122581 | atagttttag gttttacatt tgggtctatg gtccattttg agttaatttt tgtatatggt |
| 122641 | ataagatgca gattgaagat ttttttttaa tatgtggaaa actgattgtt ccagcactat |
| 122701 | ttattgaaaa gactaatttc tccattaaat tgtctttgta cctttgttgt gaatcatttg |
| 122761 | cctatatatg tgtgagtcta tttctgaatt ctcttttctg tttcagtgat tcatctatgt |
| 122821 | tgatgccaat gctacactgt cctgataact gtagttaata aagtcttaaa gttaggtagt |
| 122881 | aaaagtctgc tattttcttc cttttcaagg ttgcattttc ctattccaag taatttgcat |
| 122941 | taatcaaaaa gtacatggaa aatgtgtatt ataacaaaag gtatggaatt ttaaaatttt |
| 123001 | caaaattctt ttgcatcaaa gtaaatgtgt actaacttgt tataatatgt gtgaacagga |
| 123061 | gctagtttga ggcactaaaa aggataaatc atcaatttaa aaacagcccc tatcagagca |
| 123121 | acatgaattc tgataaaatt gaagcaagaa caaatatcaa atttatcgtg aagcgtgggt |
| 123181 | gaaaaaaggg tgaaatcatt gatgctttat gaaaaattta tggggaaaat gtcacattat |
| 123241 | caaacagata actcatttta agaacagatg atatgatgtt gaagtcgaag cccacagcag |
| 123301 | cagaccatcc acattaattg ataggaaaaa aattcatctt gtttgtgtct taattgaaga |
| 123361 | gcactgatga ttaacagcac aagtaatagc cacaaccata tacacctcaa ctggctcagc |
| 123421 | ttacacaatt ctgactgaaa aattaaaatt ggccaaagtt tccactctat gggtgccaaa |
| 123481 | accattgtgc ccagatcagc tgcaggcaag agtagagctt ttgacggaaa ttttaaacaa |
| 123541 | gtgggatcaa ggtccagaaa gatttcttaa aagaacatta ataggagatg aaacatggat |
| 123601 | tatcagtatg accctgaagc caaagcacaa tcaaaacaat ggctaccaag aggtggaagt |
| 123661 | ggcccagtca aaataagagc agaccagtca agagcaaaga tcatggcaac agttttttgg |
| 123721 | atgttcaagg cacttttctt gactttctgg agggtcaaag aacaataata tctctcatta |
| 123781 | tgggagtgtt ttgagaaagt caaagcgtta gcagaaaaac gtctggcaaa gcctcaccac |
| 123841 | agagtccttc tccaccatga caatgttcct gttcattgtc acgaaacaag ctctcacgaa |
| 123901 | ataaagctct aattttgcaa gaatttcaat gggaaatcat taggcagcca ccttacagtc |
| 123961 | ttgatttggt ttcttctgac tttttgtttt ctaatcttaa aataatcttt aaggggcacc |
| 124021 | catttttcct tagttaataa tgtaaaaaag actgcattga cataattcaa ttcccagggt |
| 124081 | cttcatttct taaggaatgg actatttggc cggtatcatt gcttacaaaa gtgtcttaaa |
| 124141 | cttgatggag cttatattga gaaataaagt ttatattttt cattttaatc ttttaattat |
| 124201 | atttttccac aaaatttttg aagtcctctc acatatataa atttttggaa tcagcttatc |
| 124261 | aagtcatgta catttactgc tatatcacac tctgttttgt gaatattcca aaattatagt |
| 124321 | ctatgattta tattgttgtg actattgcat aatttacata tcaatgtact gatgatcata |
| 124381 | ttttgcaata tttttgttat tgttattcta ttatgaacag tgctactaat ataaatagta |
| 124441 | tttgccacct catacacagg tgcaagttta ttgtaatagt cttagtatta aattttctga |
| 124501 | gtcatagttt agcaaaagct caacttttca caggatattg ctggattgtt ctccaaagta |
| 124561 | gctaagttat actcctatta gccgtatatg agagattcta atcatcttca ttcttcaaca |
| 124621 | tttactattt tcagacttac taattttgcc agaaaaaata catgacaatt catacccgta |
| 124681 | cctgtagtgg tcttgatttc catttactca gaagacattg gacttttctt cttatgttta |
| 124741 | tgggctatat tttcccttct tttatgatat tactgttcat gtttttgctc atcttattgg |
| 124801 | gttatgggcc attttatttt atttttattt tttatttatt tatttttttt tgagatggag |
| 124861 | tctcgccccg tcctgcagac tggagtgcag tggcactatc tcgactcact gcaacctcca |
| 124921 | atgggccatt ttatatccta acatatgaag tatctgttca aatcttttac catttttttc |
| 124981 | ctgtaggtgt gcttgtcctt ttcttgttat aataaaacag ttctttattt ttgatactaa |
| 125041 | tcttttagaa agtgttctgt tgggcbgggc atggtggttc atgcctgtaa tcccactctg |
| 125101 | ggaggctgag gtgggtggat tacctgaggt caggagttcg agaccaacct ggccaacatg |
| 125161 | gtgaaactcc atctctactg aaaatacaaa aattagcccg gtgtggtggc gggtgcctgt |
| 125221 | aatcccagct actcgggagg ctgaggcagg aaaattgctt gaacccagga ggtggaggtt |
| 125281 | gcagtgagct gagagcatgc cactgcactc tagcctgggt gacagagtga gactccatct |
| 125341 | caaaaaaaaa aaaaaaaaag agagagaaaa gaaaatgctc tgtcagtggc aaatatctct |
| 125401 | tacttttttt ttagttttct ttgaaacctc ttttaatgaa tagaaatttt tttattttaa |
| 125461 | tgtagtttaa ttcatctatt tttctttttt aattgtcttc agtttcttta gtcttgtttt |
| 125521 | cataatcttc tggatatgag tcttgcaaaa catcttttgt taattttctc atggtttttg |
| 125581 | ttataatagt atttagagtt attttatata tttatggtta atataaatca aattgcatgt |
| 125641 | tgttcttgct ctaaattaca gattcaataa tttgcaacaa aaccttatct ctttgtaagt |
| 125701 | ccttaagtta attaagtact ctggatatct tcacatataa atacttgtat cagctgtctt |
| 125761 | ctctcttact actccaatta aaatccagta tctagaatag ggaaaaacca ggtgaacatc |
| 125821 | acccttacag agatttattt taagacataa tttagggtgt gctccatact gccttggcta |
| 125881 | tgtactagtc tatatattct agaagggtca tatatgtgca caaattgatt tgtgtagcca |
| 125941 | aaagctgctc cagtataaat gtgccaccag gatccatttc aaaacattgc ttcctcttgc |
| 126001 | caaggttagt gcagctatgc ttgctatcac tcaagtaacc agagaatgcc agcgtccgta |
| 126061 | ctctcaaaaa gacagccttt tctgcaccat tacaattggt gtcttttgtc cctttctttt |
| 126121 | cactgatgga aatctttttt atcattccaa tcaaagatca ctaccttcct aggagaagtt |
| 126181 | tcaatagaaa gaaaaaaatg ttatacttcc tcagaaaaat agcactttct tcatatagca |
| 126241 | agttttactt tcagaaaagt tgagaaaata aatactatgc ccccaggttt cccgttattg |
| 126301 | gagattgatt gctatgttga atgtgctata gctttgctgc ttaaacccaa acgccaagtg |
| 126361 | caggagtatc ttctttacta acgcatttaa tttaccaagc acacttagtg gctggtattt |
| 126421 | cttacctttc taagggtgca ctcacttaca ctgccctcaa tatatgtaat taggataaaa |
| 126481 | ccatagaatg gaaggcatta aaaatgaggc aggaaagcac aggcagagtg ggatgaagcc |
| 126541 | agctttgctc tgaataggac ttatatgatc agtttagttt tattccaaac atgaacccca |
| 126601 | aattcaaccc ctttgacctg agtactccgt cccttaaatg gcaaactaaa cattcgtgaa |
| 126661 | aatttaatgg tgaggaaatg agtaccttct taagtttcag atggtgaaat ggcaccaggg |
| 126721 | gagcactttc agtggcaggc agaagtgtgt ggatgtgcta gatcaaacct gaaatatttg |
| 126781 | ttccttcatc ctgcagtccc tctccaaact agccagccac tgagaccttc tgacaggaca |
| 126841 | cccccaggat gtcacccaaa aaaggtattt acaaaatcaa gactgtctgt aggacactat |
| 126901 | gtctttctga gaggtataaa ggtatttgaa aactttggaa agtttgtttt acaatttttg |
| 126961 | ttccctcttt tggggctttc cctttttcat ttttttctgt gggtagtttc cctttgtttc |
| 127021 | ctgagaaatt gagaagggtt taatatctct ccaccttctt ctcttttatg gatgaatgat |
| 127081 | ttcaccaact ggtaagtgct aaaactgacc tcgctttcac tcagaaagac aatggaggaa |
| 127141 | aggaaaatgc actgagattt cagcatagca actcaaatgc gggctttatt ccacagcagt |
| 127201 | gacctattgt cagattggtg tgtgagacag tttttgaaag gggatgtgtt ctgcttccgt |
| 127261 | ttatgagtta agcaaagttc taaattaagt tgagaagagg aagcaggtaa agtcagggat |
| 127321 | agcagagaaa ggagacatca aaccctattg ttgtaggata tttatgtgaa ggaatgagca |
| 127381 | acgtgataaa acacattttt gcttgcbgtg acttgccata gggtgcattt tcagtactgt |
| 127441 | gtggataatg tgtggcatgt tcattcatca gtcattctgt gacatttatg tagcttacac |
| 127501 | ttggatctat tttcaacaac atttcagttc cctaaagaca aactggcaga attttcaaat |
| 127561 | aggaaaaacc tggacacaca catttgcttt tctgtataga ctgtctagtc cagataatct |
| 127621 | tgctatcagt cattttgtta gcttactcat ttaatcttag aatggaaagt ggaaacagag |
| 127681 | acctcattta gagataatct agtaaagcca tccagcttca ggctcatatc ttgggaatct |
| 127741 | gagcagtacc ctatttaata tgctcatttt attaacttta aacacctgga gaacatcatt |
| 127801 | attgagaagg tcattgcttt tgaaaaaaca aaaacaaaac aaccacttct tatgaggctc |
| 127861 | tacacatctt tccaaagaag ctattggaaa tggcccaaac tttcatatta actcttaaca |
| 127921 | gggtggcgtg gtttttcatt agtaagaaca ggattcaaat cttatggaag atggtagatt |
| 127981 | tcaacacctt agcatttttc tcaaccctgg gatcttcaag ttcctcaggc tatttaggta |
| 128041 | gttatagtgc tggcaaactt tttaagtgcc cagtagtttt tacaaaaact tgtaataaat |
| 128101 | ctgctcaggc tatcttaatt gccaaccatc tcattaagca agtcaaatta gaatggatta |
| 128161 | ttcctgctgt ttattagtgc tgcatattat ttatcattta ttaaccttat tgtgctcaca |
| 128221 | tagcaggtat tttaaagttt aacagcttta ttttaattat gaatgtaata tatgctgttg |
| 128281 | cagaaaatat gtaaacttta gagaaaatgt actaaatgat gcactgatga aaatacagaa |
| 128341 | tcccaccaca aaaatattat tatcaacatt tgggtattct cttccaaact ttttatatga |
| 128401 | gagttatgtt tggtttatac ataataaaat gggtaaaaat caataaatag aaagcaaatg |
| 128461 | tttttaaggc agtacttggg cttcataaga atggaaaaaa atgatagact tgcctggtgt |
| 128521 | ggtttgcata atgtcacaga atcataacaa tagctccatt attgagtgtc tattatgtgc |
| 128581 | caggttctgt acaatgttca gtgatgcgtc actgtgatga ctagaggtaa aggaaagata |
| 128641 | agtgatgcct tactatgatg acttccaaca agctatgaag ggacagaaca agcctttttt |
| 128701 | tttaactttt attttaggct tgggagtacg tatgaaagtt tgttacatag gtaaacatgt |
| 128761 | gtcacagggg tttgttgtgc atattatttc acacccaggt acctatgtcc agaacccaat |
| 128821 | agtttagttt tcttttctcc tcccctccct cattctatcc tcccccctca catagacccc |
| 128881 | agggtctgtt gtttccttct ttgttttcat aagttcttat cattatcata cttataaatg |
| 128941 | agaacgtggt atttggttgt ctgtttctgc attagttggc taaggataat gtcttccagc |
| 129001 | tccatccacg ttcccacata agatataatc tcgttctttt tttatggctg catggtattt |
| 129061 | catggtgtat tttatatata tagatatata gatatatata taaatatata tagatatata |
| 129121 | tataaatata tataggtata tatatgtcac atatatatat cacatataca aggatatgtc |
| 129181 | ctctagctcc atccatgttc ccacataaga cataatctcg ttcttgtttt atggctgcgt |
| 129241 | ggtatttcat ggtgtatttt atatatatat atctatataa aaatatatag atatatatat |
| 129301 | cacatatata tagcacatgt atctatatca catatatata tatatcacat tttctttatc |
| 129361 | cagttgggac agaacaagtc aactggcaag tccattgctc agcttgttga aatactctgc |
| 129421 | acagaatgca aggaaaaact gttttcatga ggtagcccat gaagcgatga agcaaggcaa |
| 129481 | atttatctgc ctggataacc tcctgtatgc tgttttcact ccatggagag tcaacacaac |
| 129541 | agacttctga gttgtattat cgagctcctt caacagggca ttgctgtaag atcctagatc |
| 129601 | ccacactcca tggtgtgatg ttttagccaa gtctggaagt agcacaggcc ctaaaatctc |
| 129661 | atgattgcag gttgtcaact ctgctgtagg cttgccactt caagggcaag tggttggttg |
| 129721 | gggctgggat ttgggcagag ccatagaaag aaagggaaca ttcaagggaa tttgatgatg |
| 129781 | tgcatgatgt ctctgtctga tacaaaaaga aaaaaaaact ctaaaaacat ttgatacata |
| 129841 | gaaatactag tatttggtga gattgaatgt gggaagatga gggataagaa ggtattaaga |
| 129901 | atgactccca agtttctgac ttggtcagtt gagtagaagg gaaattttta tttttatttt |
| 129961 | tatttttaaa atttcagtaa gtttttaggg aacaggtggt gtttggttac atgaataagt |
| 130021 | tctttagtgg tgatttctga gattttggtg cacctatcac ctaagcaggg tacactatgc |
| 130081 | ccaatgtgta gtctcttatc cctcaccccc catcctttcc cttgactccc caaagtccat |
| 130141 | tgtaacattc ttatgccttt gtgtcctcat aatttagctc ccaattgtga gtgagaacat |
| 130201 | atgatgtttg gttttccact cccgagttgc ttcacttaca ataatagtct ccaattcatg |
| 130261 | ccaacatcta ttattttttg attttttgat catgaccatt gttgtaggag ggaggtggta |
| 130321 | tcccattatg gttttgattt gtatttccct gataattagt gatgctgaac atctttccat |
| 130381 | atacttgttg gccatttgta tatctgagta gaaggtaatt ctaataaata aaacaggaag |
| 130441 | gcagcagaaa gaggtttgtt tgggatatgg cttgattatt tgcaagatat ttgctgtagc |
| 130501 | ttaggagaaa ggtggatgtt ggtgatactg attttgtcat tatctgtgag ttaaagtttc |
| 130561 | taaaatcacg tggcttccta gggaaagcat atagaatgac aagggaagat ggctagatgg |
| 130621 | ctagtaatgg caccctgaac aacttcagca tttagaggtg ggtggaggag gataagccca |
| 130681 | tggaagaaac agaaaggatg ggccagcgag atgagaggag aagctaaggg agtagacagt |
| 130741 | taccagaggg aaggtgggat cagttaagaa ccttagtatg ttgcaaagaa ataacctgca |
| 130801 | atgcggacca acccggggaa cgtctgtaaa aatgatgaca attcttaatt gtaatttaaa |
| 130861 | atgtaattgt attgagagct ctctctgtct ttgtctcatc ataatttgaa gcagattaac |
| 130921 | tacatattag ctagaaaaag ccctttgaaa ttttccttca atgtatcaat agattctatg |
| 130981 | actttttgta agtagaaact gcctattggt aaaatagcac ttaattgaga taatgcttgt |
| 131041 | gaaagccatt tctaaacttt gaattgacat acaaaataaa ggtggcaatc atcaccatgt |
| 131101 | tgctatactg tctttggcca tataaaattt ttttcaacaa tacaaagata agccttgtac |
| 131161 | aaattcttca aaattctaaa tttgtggtac ttgaataatg ttttactata tataaagatg |
| 131221 | aatagatagc atttcctaca ataaataaat aatttatata tcaatgtgtt gggattataa |
| 131281 | attctcatag aaattcactt tattaattca ttcattcatc tgatcacagt tcattcagca |
| 131341 | aataatttgt tttgttcttt ttaagtgctc tgggaagaag gtattgtgac agagtccctt |
| 131401 | ctctcaaagc gtttatagat tcatgtgttt ggggaaagta cagaacaatt attgaaataa |
| 131461 | aaccagagtc aggcacattg ctatgccagc tataaagagc ctatgaaaat taggaacatt |
| 131521 | gacacatttg ttcctaacct ggtttgtgct ttcaggattc ctctgaagtg gcagcactcc |
| 131581 | ttgggtttga aatgttcgtc agtaatgact gatggacatc aacaggtgaa tagacacaca |
| 131641 | aaaaacctat gaaacttaca taccataggt tactattcaa caataaaaag aaaaactgtt |
| 131701 | gatacatcta acaatgtaga tgaatctcaa aagcattatg ctattccttt ggctgataaa |
| 131761 | atggtgacac tcctttattt ctctttcttt catcccactt ttaaaatcag ccttagtata |
| 131821 | ctttaggcac aatatactat atacatttaa aatgacaatt tgacaagttt tgacaaatgt |
| 131881 | atatacatta taaaaatcat gataaagatt tccgccgcct caaaatgttt cctcatgcct |
| 131941 | tcttggaata aatccacaca ttccttcctt ctctacaccc caccacccat atactctacc |
| 132001 | tctagaccca agcaattgct agtctgcttt ttgtcagcgt aaattagttt gcattttcta |
| 132061 | gaatttcata ttaatggaaa tgtacagtaa gtactctttt gtgcctgact tcttacattt |
| 132121 | agtatagtgc ttttaagatt tatccaaatt gttgggtgta tcaataattt gtttcttttt |
| 132181 | attgctgagt agtattctat tgtatacgtg gttcacagtt tatccattca ccagttaatg |
| 132241 | gacattccag ttgttttata tttggggctg ttatgaataa agctgatgtg aacatttgaa |
| 132301 | tagaagtctg ttgtgaatgt ttggattgga attgcbgggt tgtacagtaa gtgtttgatt |
| 132361 | aacttcataa gaaactgcca aatgattttc caaagtggct acatataatt ttgcattttc |
| 132421 | accagcagtg tatgagattt ccagttgatc ctcatcctca ttcaaaacct ggaattaaga |
| 132481 | gtgaatcttt taaattttag ccttttgaga aaatgtgtag tggtacttca ttgtagtttt |
| 132541 | agttcgcact tctctaatga ctaatgatgt ttaacatgct tttatatctt cttttgtctc |
| 132601 | catctattct ttgttcttca ttctcttttc ttcctttaga gtaagtattt tttattttat |
| 132661 | tccattttca ctattggtat attatctata aattctttgt tgttgttcca ttttagtggg |
| 132721 | tttacaatat aaatctttaa cttatcacag tctgtcatca aataatggta taccccttac |
| 132781 | atatgtttta ggaaccttac agtggtaaaa atatcagttc cccatcctgt acttgttgct |
| 132841 | attgttttca tgcattttat tctgtatata ttataaactc tacaatctat cattattact |
| 132901 | ttttgtttaa atattaaatt ctttaaaaga gatttttaaa aataagaaaa tagtctttca |
| 132961 | tattttctca tgtatttgcc atttttattg tttttttttt cttccatatt tgagatccaa |
| 133021 | atttctatct ggtatacttt tccttctgcc tgaataacta cctttagtat ttttttgtag |
| 133081 | tacagatctg ttggcaatga ttatctgaac ttctgtatgt ctgaaaaagc ctttagctaa |
| 133141 | tttttgaaag ttttttgatg gacatatgat atggtttggc cctgtgtctc catctaaatc |
| 133201 | ttatcttgaa ttgtaatccc catgatcccc atgtgtcaag ggtgggacca ggtggaggta |
| 133261 | attggatcat gagggccgtt cgccccatgc tgttctccta ataatgagtg agtctcatga |
| 133321 | gatccgatgg ttttataagt gtctgacatt tcccctgctt gcacttctcc tttctgccac |
| 133381 | cttgtgaagc aggtgcctgt ttccccttca ccttctgcca tgattgtaag tttcatgagg |
| 133441 | tctccccagc cttgctgaac tgttagtcaa ttaaacctct ttcctttata aattacccag |
| 133501 | tctcaggtat ttcttcatag cagcatgaga atggactaac acggtacata caattacagg |
| 133561 | ttgctagtcc cttttttccc ttcagtgctt taaggatttc actcttccat agtttctgat |
| 133621 | gagtagtctg accattccta actttgtgcc attattttct catttttttc tgactctccc |
| 133681 | ttctgggact ccaattacaa atatcccaga cttcctaact ttggcaggtc aagagatcga |
| 133741 | gaccatcctg gtcaacatgg tgaaacccag tctctactaa atatacaaaa aattagccag |
| 133801 | gcatggtggt gggcgcctgt agtcccagct acttgtaagg ctgaggcagg agaatggctt |
| 133861 | gaacccggga gggggagcct gcagtgagct gagatcgcgc cactgcactc cagcccgggc |
| 133921 | gacagaccga gaatccgtat caaaaaaaaa aaatcattca aaagattact gatgcttgtt |
| 133981 | tcattttttt ttaatttttc aactggtaat taatttatta aaatagttga cttatacgtc |
| 134041 | tacaatggtg acttccatct caactcctgg ctcaatactg atggaagtaa tctgcttaac |
| 134101 | aatctcagaa ggactgagca agtcaatgag tcgcttgtgg attctcatct ggaaatgatc |
| 134161 | ccatggctta gaaccttcac cacatggagt tttttcttgt agtgattctc aaagtcttag |
| 134221 | taggcatttg aactggtctt ttcactttga gattcttttc ctttgctcct ctgatcaagt |
| 134281 | cagcacacac cttcgccagg gattttacat tgcagcttgt tagagtgatt cgaattcggt |
| 134341 | gaattgccat cttcggctcc gtgggtgttt ttccggtatc cttaaaagcc atcactgctg |
| 134401 | cgcggcttcc tgacctactt gttccggcaa gagtgaacag tggtgagtca ggagcaggtg |
| 134461 | cgggcggatc agagctccac aacacctacg accacctctt cttcaaagag gtgtttcatg |
| 134521 | ttttaaaatc ttaatttcct tctgtttcat tttggataaa atctgtcttc aagtttggtg |
| 134581 | cctttttttt tgggccaata tctaatctaa agttcatcct atccagtatg tttctcattt |
| 134641 | caaatattgt attttctatc tgcagagttt gatttgtatt tgaaaacgtt ttttaatctt |
| 134701 | tctcattgtc ttaaacattt ggagtatact tataataatt gttttactgt tgttatctgt |
| 134761 | tacttctatc atctatgaaa ttactatatc tgtttctatt gattgatttg attactattc |
| 134821 | tggttgggag gcaatatttt ccctacttct ttgcttactt ggtaattttt ttatcaatga |
| 134881 | aaatttataa aagtgaactt catttacaat tggatataat gaattttaca tttttgtgtc |
| 134941 | ctggattttt ctgtattcct ttaaatattg ttggatttct tttttttccc ccctccggga |
| 135001 | tgcagataag tttcttggaa ttagctggat gcttttgaga tttgctttta agatttgtta |
| 135061 | gggtgaattc agagcagggc tactttgatc taggaaatag ccctctgaag ggtctcatgt |
| 135121 | tctgtgagat aggaggtctt tctcctctga ctggttggta gcctaagcta ttcctgattc |
| 135181 | ttgtaaggtc tggacactgt tctgcatact cttttctgat agttctttcc ctggccttag |
| 135241 | tagttaccac acatctatgc acatagcggt attcagccaa agtttgaaag gattcaaaga |
| 135301 | tctccagagc tctctctgta tcactgtttc tgttattcta tcccacaaat tctaagtgtg |
| 135361 | tgaaactccc tgaaatcaga actatgtctc ctcaactcag tgagaccaca agccactgtt |
| 135421 | tgggtttccc ctgcccatgt tgcagcctag aaactctcct caggcaaaaa gatcaggcaa |
| 135481 | catcggggtc atctcatttc cttccctttc agagatcact gtaattgcct attgaacaat |
| 135541 | gcctgaagaa agatgtttca tatattttgt ctggctttct agttgcttaa ggtaagaagg |
| 135601 | taaatgcatt cctagttact gcattgtggc tgggagcaga attccaatac tgtttttttt |
| 135661 | ataatatgct tttacttaat tatttgagga ttccctttag ttatcataat tttacatgat |
| 135721 | gtaaacaggt aaatgagaat atcttcaaaa tatatttttc agttttgggg tggttctctc |
| 135781 | agttctggtt tttgccaaat ataatagatt tttagtatct gagttccata tgacaaaatt |
| 135841 | tataaatctt gggtgtatcc atatggtatg ttataatcgg aaaagataga tgaaattccg |
| 135901 | cttttgtcta atgtctttat aggtcttgga gaaacttgaa gaagggttgt aaagtccata |
| 135961 | actttacaat gagacaaaat taaaagaatc caagccaaaa ttgtcctaga caatgaaaag |
| 136021 | tatcgctatg cagaagccaa atctcttaag ctcctccacc atatcagtca tgacacagtc |
| 136081 | tatagtttaa caattgtttc aatttggaaa ttaattttta gtactaattt aaatatttca |
| 136141 | tattagtata tgagaattct tccttctgtt caggctgtgg tatggggaaa agtcagttcc |
| 136201 | catcaatgca gattcatatc taccagcaca gtgattaaat tatcctcata tcctcttgtg |
| 136261 | tttgaacaag ctgtgtactt ttaattttaa tggatttaac tcaatattca atatatgttg |
| 136321 | attactgaat acaacaaaaa gtgtaataga cactccttga gaagctcata atctatttgg |
| 136381 | gcagatggaa caaatactta gaaaaattga aaggtagttt aggaccacag taaaaaaaaa |
| 136441 | ttgggggtgc aggatataaa gtatcaattg aattgtagaa gcaatatata ctgtgtattt |
| 136501 | tttcacctgg gtgagagggt gagactccgt ctaaaaaaaa aaaaaaaact atggttgttc |
| 136561 | accataacta aacatttaat ctctttcagt ctatcttact catctacaaa atggagataa |
| 136621 | tacctgtttt gcagtgcagg ccctgacata cgggtagagt tccataaatc ctagcttcta |
| 136681 | ttccttaact cttttaactc ttttcttcct tccttctttc tagctaattt ttaactctct |
| 136741 | atcctagaca acttttgcta aacgtgtata acatgtagta cctacgcata ggaatatgtt |
| 136801 | ttatagaaca gaattattga aaacagcttc ttacatttct gttatttttt caaaagcaag |
| 136861 | aattcatgta ttccttctga gccaagtaca tgcaataaaa agtaagagag attcagaaat |
| 136921 | tctgatgatt attctcccaa gaagagtgct tgctagagtg agggtcttgc agacacagaa |
| 136981 | ggagctgatg gggtgaactg ctggggtgtt acaaaaggcc ttcgggaaaa tacgtaatct |
| 137041 | aagtcaataa atcatagagt gaagattccc tcagggaaaa agggagtggt tctgaagaac |
| 137101 | ttacaaattt ttccaggcaa tagccacaga tgctagcaca agggcattat ggccacatag |
| 137161 | tgtgagcaaa agtgcttaac tttttgccct tcttctaata tttactctat tagcccagac |
| 137221 | aacatgagat ccagaagcct catgatgagt ggagaggaaa tataaatcag aagaaatggt |
| 137281 | caaaaagatg cctatattca cttccgcact taggtctcca agcctcagtt cctggcatga |
| 137341 | gtaggtagag gagaggagct tggaatagga tgtgagatta cagttttaat atagactgga |
| 137401 | ctggatattt gaatacctga aaatgaatct gaattctcaa aatgaggtgg ttcctgcaac |
| 137461 | tgaaaataac aagaaagcta caggatcttc tgccatgtta tccaggggtg gaaaagtgaa |
| 137521 | attcagtgga gccaggttaa agatggagtt tgggccggga gtggtggttc atgcctataa |
| 137581 | tcccagaact ttgagaggcc aaggtgggca gattacttga ggccaggata tcaagaccag |
| 137641 | cctggccaac atggtgaaac cccatctcta ctaaaaataa aaaattagcc aggtgtggtg |
| 137701 | gcatgtgcct gtagtcccag ctactggggt gggtgaggca tgagaatcac ttgaacctgg |
| 137761 | aagggggagc ctgtggtgag tcaagattgc accactgcac tcccgcctgg gcaacagagc |
| 137821 | aagaccctgt gtgaccttgt gtccaaaaac agacaaacaa acaaatacca tgtggagttt |
| 137881 | gtttactctt taaacaaata tccttcatgt gttgaactga actataatta tagttagtag |
| 137941 | ggcacatagc aggttttaat aagatatcta gttcttcctc ttaaggtaac tcgttagaac |
| 138001 | ttttatgaga aagaactaaa gaatttctaa tggggcagct aatccactct tttgtgcact |
| 138061 | ctgttctgct gatgatctga tgttagtcgg ggtttctgtt tgagattcct gagccttaac |
| 138121 | tgctgatgac agagttcaaa atcattgctt tctaactttg agaatgactg cctaatatga |
| 138181 | catcattttc tacccctgag tgctaatagt ctaccttatt cctcctgcct gtccttctcc |
| 138241 | ttgaggagga ggatcatcaa tgcactgtgt ggattgaagt ggcttcatac ccttttgatg |
| 138301 | ttaatgttct cctttgctta aagtgtgaac tgaatatgga tccctcattt atgaagcacc |
| 138361 | atgacacttc ctgggtaatg aacaattaaa cagacttctc agcaatagtg actatttttc |
| 138421 | tgatttttca cttcatggac aatattgtat gcaagttaaa tttgcaacta gcttgaggct |
| 138481 | tcacacatgg tgagtttgag aaattgaatt ctctacctca aatgtatttc cttttccttg |
| 138541 | aactctacat tcaggtcagc tgtccagttc ttaaacaaca ggttttggag aggcaatgag |
| 138601 | taataaaata gcattttctc cttcaattct atctgcattt gaaaaaaata accttttatt |
| 138661 | tttgattcaa agaagagagg agttttcttg tctttctaca tctgttccaa ctcctccaaa |
| 138721 | tgcacaaaaa ttttttcaga gcattccaga gtttctcaga ctgcacatag aagattttgc |
| 138781 | atatagatac atcttggcca taataacctt ctactgaatt agtagaaaat agatgtattc |
| 138841 | taggttttca tatctttatg gcaatatgaa tagacaaggc tcttcttgca aaaatatctc |
| 138901 | ctgaactgtg cgggagatgc ttggaagacc cagtcaaaat tacgaagtat cccaagtttg |
| 138961 | tatcctcctg tggcttcccc gtattacaat aatgtcattc tgatccaggt tccagtactc |
| 139021 | tcaagccctt gtccttccct tttcatttta gcttgcattc atccaagtat ttggatggaa |
| 139081 | attatcaata ccttatacga gaacgtatgg gaggctgagg cgggcggatc acgaggtcag |
| 139141 | gagatcgaga ccatcctggc taacacagtt aaaccctgtc tctaccagaa aaatacaaaa |
| 139201 | aattagccat gcatggtggc acgcgcctgt agtcccagct acttgggagg ctgaggcagg |
| 139261 | agaatcgctt gaacctggga ggcagaggtt gcagtgagcc aagatcacgc caccgcactc |
| 139321 | cagcctgggt gacagagcga gactcatctc aaaaacaaac aaacaaaaag aatgtaaatg |
| 139381 | attgggagtt aaaattatgc ttttcagttt tcagccatgg atcatgtttt cttgccttgc |
| 139441 | ctgattccta gagtctcact ccatgatgtt tcctctttat tataaagatt agatggcttt |
| 139501 | gcattgctgc catgtggcat ttatacttct caagcagctg tgtcatctta ttctaccgtt |
| 139561 | taaacttagt tttactttaa gtccacatct aaactgtttg cctgcatgcc cagcactttt |
| 139621 | tccaccctct acattttatt tgactggagc aatcacctta gcctctctag gtctttgctt |
| 139681 | atcatcactc tgctcattct tcaagcctca cttgattact gcctcctctg tgttgctttc |
| 139741 | ctggatttcc tcagtaagac atagtttctc cctttcatac ttctgtggta ttaagtatgc |
| 139801 | accagttaca tgtgactcat ctccaagtgc tttggcatgg agatattatt tatgttcctt |
| 139861 | atatgactac tgaccacttt tttctagact aaatattgaa acacttggcc agataatttt |
| 139921 | gcttaatttt gagtttcctt ttatactttt taaaacaaat ttttgaaatt aaattacatt |
| 139981 | ttgttaggtt gcaaatctga aaaagtccaa ggatgaggtg agtttgttgt ggtcagttgg |
| 140041 | gtagttgcta aactcatagc tggtttgtgt ctgctgacca gcacattgtt agcctagaga |
| 140101 | aagtctacat ggggaaccag attatgatgc aagcgttgct tggagagccc ttgatcaaga |
| 140161 | gcaaaacagg ttggtagact cgagggatag ttcagctagg tctgatggaa cattccagtt |
| 140221 | ttgccaacag aaggaaaaac attggaaggg cttatcttcc ccaggatctg gatctgttcc |
| 140281 | actgggtaac atttaataag cactaacatg gtctcttctt tcacttgcca tttcctgtgc |
| 140341 | ttctttttcc aactactaca tctcctttga cacattttct ttttcttttt cttttttttt |
| 140401 | ttttgagata gagtcttgct ctgtcaccca ggctggagta cagtggtacg atcttagctc |
| 140461 | accgcaacct ccacctcccc ggtccaagcg attctcctgc ctcagcctcc tgaattgctg |
| 140521 | ggatcacaga tgtgcgccac cacactcagc aatttttttt ttttttttgt atttttagta |
| 140581 | gaggcagggt ttcaccatgt tggccaggct ggtctcgaac tcctgacctc aggtaatcca |
| 140641 | ctggcctcgg cgtcctagag tgctggcatt acaggtgtga gccactgtgc ctggcctctt |
| 140701 | tttaagtgta tcaataccat cattttggct gcttattctg ccctgggagc cattctgtct |
| 140761 | ctttaggaag tttttgcgtg tatcagatct catcttttat attttgatgt ttaatagcat |
| 140821 | ttaaaggatt ttgttttgtg ttttttaaat gatttgaaaa caagtgtgct cactaattaa |
| 140881 | taaacagcag attcaaactt ttgttgcttt ttcaagaaaa aaatgaaaaa ttctgtaaca |
| 140941 | atatatctta gccataaaac acttgtaatc agcactcctc cagaaatttc aggatgtaag |
| 141001 | ttatcttaat gattatacta gaaaatcttg gaaagcaggg atatggctaa ctttttataa |
| 141061 | catgtatccc tactgtcaca acaagagtta agacttaata aatacagtca tgtgttgctt |
| 141121 | aacaactggg atatattctt gtaaccaccc aaggggttca ttttgcctgc tacctggata |
| 141181 | cagccaattt atcaagaacc aggaattgca gtagagaaag ggtttaattc atacagagcc |
| 141241 | agctgaatgg gacactagag ttctattact gaagtcagtc tccctgaaaa ttcagagggt |
| 141301 | agggtttttc aaggatagtt tgaagggcca gggaatggtg ctgctgattg gttggagata |
| 141361 | caatcatagg gatgtggaaa atggtcctca tgcatttctc aagtccactc cttttcttag |
| 141421 | ttcctgctta gcggaggtgt tagaatttgc ttcttggtgg ggccacagga ctggttggtg |
| 141481 | ggtccaggtg gggccaccag ttgtcagaaa tgcaaaaacc tgaaaagaca tctcaaaaga |
| 141541 | ccaatcttag gttctgtaat agtgatgtta tttgcaggag taattgggga agttgcaaat |
| 141601 | cttgtggcta atttgttagt cctacaaagg cagcctagtc cccaggaaag aagggggttt |
| 141661 | atttaaggaa agggcbgtta tcatctttgt ttcaaagtta aactataaac taagttcctc |
| 141721 | ccaaagttag ttggacctgt ccccaggaat ggacaagggc agcttggagg ttagaaacaa |
| 141781 | gatggaatct gttagtttag atctctttca ctgtcataat tttgtcactg ttaacgtttg |
| 141841 | caaaggtggt ttcactgtag actttataaa caccatatac ttagactata ctaagtttat |
| 141901 | taaaaatatt tttctttctt tagtaacaaa ttaaccttag cttactataa gttttttact |
| 141961 | ttttgaagtt tttaattttt ttgaactttt gactcttgta ataacagcat aaaacacact |
| 142021 | ttgtacaact gtacaaacat attttcttta tatacttatt ctataagtgc tttctatttt |
| 142081 | cattttttcc ctttaaactt tttaatttaa atgaagacag aaacacaata ccctaggtct |
| 142141 | acacaggttc tggatcatca atatcattat ccaccacctc cacatcttgt cccactggaa |
| 142201 | gatcttcatg gacaataaca cgaagctctc gtctcctgtg ttaacaatgc cttcttctgg |
| 142261 | aatacctcct gaaagacctg cctgaggctg ttttatagtt aatttccttt tttacaagta |
| 142321 | gaaggagtac actctaaaat aacgattaag agtattgtac agtaaataaa tacagcagta |
| 142381 | acagagtcgg ttattatcat tatcaagtat tatgtactat acctaattgt gctacatttt |
| 142441 | tgtatgcctg gcagtgcagt aggtgtgttt caccaggatc accacaaaca tatgagtaat |
| 142501 | gtgttgatct atgacattac cagagctacc atgttgatat aaacaggaga cagggaaata |
| 142561 | ctgggtagaa gagggcagtt ccctggcaaa agccttactc ccaagcctgg aaacctgcag |
| 142621 | tcctaaatgg gaataggcat tcctgtttgt gcatccaaat gttgcctttt ggcctgccat |
| 142681 | gcccctctgt cctgtatcca tataaacccc aaatcccagg cttgatgagc agatgagcag |
| 142741 | acaaacagaa gagcagagga gcagaagagt ggtgctgcag agaaagagag aagagaagga |
| 142801 | gcatctgaat gtcaagagga gtttggatgg ggatggtcag agaggagatc agctgcagga |
| 142861 | cagccaaact ccaggggaag atcatctctc actccatccc ctttccagct ccccacccat |
| 142921 | cctgctgaga gccacctcca tcacccagta aaatcctcac attcaccatc cttcaagttc |
| 142981 | atgtgtgact tgattcttcc tggacactgg acaagaacct gggtaccaag agggcactga |
| 143041 | gctggttaac acttaagcca tctgcggatg gcggagctaa aagagcactg tagcacaccc |
| 143101 | actggggctt tgagagtcac aggcacacac ccctagatgc caccgtggga tgggaaccca |
| 143161 | aaagtgctcg ccctggctcc tgcacctatc tgtctacatg ctccctctcc tataacaggc |
| 143221 | ttgcacagca gtgactgcgc aacagatgag ccacacccct tccacatgtc tgcaaggggt |
| 143281 | atcagggaac tctccccttt caatgtcagt aggtaatagg aattttttag ctcctttata |
| 143341 | atcttatgat accacctttg tgtatgtggt ctgtcattga ctgaagtgtc gttatgtggt |
| 143401 | acgtgactgt atttattgag tggatggtca attgtatgag gtacttgaat aatgagtggt |
| 143461 | gtgaaccttg gttttatgac atcttctgag agctgctttc aggtgggtat aagaagagat |
| 143521 | atttctagtc taggtcccca ctccttttct tagttcctgc ttagtggagg tgttagaaaa |
| 143581 | aaaggttgga ctctggcact attttcctcc attggttata tggactcaaa gccataactt |
| 143641 | aaggaagaat gtctattttt agatttggtg actgatttag ataggttgct acagaaagtg |
| 143701 | gtacaaagat atttcacaca tagaatatca aatccagggt gctttagcac tgcattccaa |
| 143761 | tggcctggga tggatgggtg gaagccctgg caagctgaaa taaaccaggg caagctcctc |
| 143821 | tttggaattc acaagtctga caactggtga ctcaggctct agtcaggaga cctgaatgtt |
| 143881 | acgtctggca tcacgatacc ttagtttaca gagattaatc taacaggcct tcagttagtt |
| 143941 | tgctttattt taaaattctg cttagctttt tgttgcctac taaatttctc ctgatgtata |
| 144001 | tttagatgta ggtgaaggct gtagatgtat gcactaccaa caccagcttc tgggagggaa |
| 144061 | cattttccca ctcacaagca agtgaacttt gctttctcca tgaagaagaa tgacctgcat |
| 144121 | gatggctttc agaagtggag aacatggctc acagttccct ccacagttcc tccatggcct |
| 144181 | ttggttgcat cttctctgaa tggaggagct tgggttatgt gaaaagcaga gctaccagac |
| 144241 | tacataaatg ttttagtgag aaggcagcaa attaaaatat cagaaatttt gaaaggaaag |
| 144301 | gtttataata gttagattta aaacatactt tgaggccagg cagcgtggct tacgccagta |
| 144361 | atcccagcac tttgggaggc caaggcggga ggattgcttg agggcaggtg ttcgagacta |
| 144421 | gcctgcacta cataacaaga ccttgtcctg tctctattaa aaaaaaaaaa aggaaggaaa |
| 144481 | gggaagaaaa agtgctttaa tattcagagg catgagagat gcaatgagta atataggacc |
| 144541 | ttctctaagg acactggggg agcactctac agaggtggtt ctaatctagc ctggcaaatc |
| 144601 | tctgttccct tcatgccttg tacttccttc ttctttgtga ctttgctaat gttattcctt |
| 144661 | cctcttggac aaatttccta tactaaccaa aaggccccaa gacacagggg gaaatgtggt |
| 144721 | aaatctgaga ctggaaggaa attaccatct aatgtcactc ttgtacagta taactattgt |
| 144781 | taatattatt gcbggggtca ctcatttatt catatcacaa acactgactg agtgcctatt |
| 144841 | atttgccaag catgggcaat aaagagttga agaccaacaa agcccctgcc ttcccagaag |
| 144901 | cttatttgct tgtggggaaa ataaacagtg gatcaattaa caaataagta gataacataa |
| 144961 | tgtcacggcc aggcgtggtg gcctcatgct ggtaatccca gcactttgga agactgaggt |
| 145021 | gggaggatca cttaggccca ggagtttgag accagcctgg gcagcatagg gaaatcccat |
| 145081 | ctctaccaaa acaaaacaaa acaaaacaaa acaaaacaaa acaaacaata aacgaaacac |
| 145141 | atggtggcgt gtgcctgtag tcccagctac tcaggaggct gaggtgggag gatcacttga |
| 145201 | gcccaggaca cagaggttgc agtgagccaa catctcccca ctgcactcca gcccgggtga |
| 145261 | cagggtgaga ccctgtctca aaacaaacaa acaaacaaaa caaccaaaaa ccaaaaaaag |
| 145321 | taatgtcaga tggtgactgt tttgaggaaa ataaagcagg gtaggggaac tagtgataac |
| 145381 | tggtagattt gggtttctcc atctctggct gcttttgcat cctcagtaag gtgagagtgg |
| 145441 | caaaggaaat tccaggttga ctttcgggtt cagtgaattt tctaccccgt gtctcttcac |
| 145501 | tgccctttcc ctccccagaa cctctaaaat ctgatcctta gattctgcaa tgtaagtcag |
| 145561 | cttccttctt cctggttgcc agctcactac attcttattc ctggataaac caaaaatctc |
| 145621 | ttccttgttt tcatattttc aaaaagatgt agaaatctct cacctgctca tgttccttcc |
| 145681 | tttttgtctt gttggtatat atacctttta caattctttc actaccaaat gtagttggat |
| 145741 | attgggatgt agtcacaaca aacacataaa tacaattcac catttttaaa tggacttatt |
| 145801 | catttagtct gcttaaaatt gagataataa cacacgcacc agttgggttt ctctgagaac |
| 145861 | tctgggcatt tttaatcctg gcaattttta aattgcttag cagtaaaaca gtcagacaac |
| 145921 | agcacctatt gttataaatc cctgcctctt cttacctcaa tgaggctatc ctttctctct |
| 145981 | atcaattctg tcagcagaat taagaagagc cattgatttc cagtttgttc agcgtttttc |
| 146041 | ttcttaggat gggagtgatg acttctaacc tctttacatc tagagactca atttaagtct |
| 146101 | acttctttca ttcagccttc tctcttcatt ttcagctgcc tggaatgtct tctttctctc |
| 146161 | agttcctatc tttgacatta aaaatcacag tacttagtta tattctacct cacaccaatc |
| 146221 | attttacttg ttaatatctt ttttcctagt tagattgtga cattttggaa taaaagaaaa |
| 146281 | atatcctttt ttactttata gctctccaga tttcattaga ttagtataga ttcgagtgcc |
| 146341 | ttttatatat caggcaatgc ctagtgtata atatttttac ttatgggttt tagcatttaa |
| 146401 | cttatttaat gatcacaaca ttcctatgat gttatttgtt ttcataattt gttgaaatga |
| 146461 | aagctgatgg tcagaaaggt taaaaagttg tctggtcata atttttgagg aggcagagct |
| 146521 | aggttttgaa cgcaggtctg tctgattctg agaataatcc tgtgctcctt cagctgaacc |
| 146581 | acacagcccc tcttagtgct ttgtctccat agacactaag tgtattcttg ttgattgagt |
| 146641 | gaattaacga gtgaattatc tggagctctt tctgcttctg ttttcttctc tgtacaatga |
| 146701 | ggatcatcac atgaacctga tctaagaata gaatagtcca actgagttcc cttaatttgg |
| 146761 | taaccaagag agagtagagt taattaacta gaaccctttg ccatcacttc tctctaaact |
| 146821 | tttcatcatt ttcctctaaa agtccggtcc tgagctctat tacaagatag aacattttag |
| 146881 | cctctatcga agagagcact attaatattt tatggcattg gctccttttt tcctaatact |
| 146941 | gtgggattaa aataatgttt actaaattct ggatgttcga ttcctgtttt ttcatgatat |
| 147001 | tttataatcc aggccttctt catagagaca cagggctatg ttttataact gccagggtca |
| 147061 | agcaaagaac agcttgtgtg agatacttaa agaaatagct aagcagtaac ttcagacctt |
| 147121 | ctgtatattt tcctcaaaat tttctctcag tttttgtctc cctacaactc atttttagaa |
| 147181 | aacaaaaaca taacacaatt ttgccctttt aaaagataat acagcbgggt gcagtggctc |
| 147241 | acgcttgtaa tcccagcact ttgggaggct gaggtggggc agatcacctg aggtcaggag |
| 147301 | ttcaagacca gcctggccaa tatggtgaaa ccctgtctct actaaaaata caaaaattag |
| 147361 | ctgggtgagg tggcggcagg cgcctgtaat cccagatacc cgggaagctg aggcaggagg |
| 147421 | atcgcttgaa cctgggaggc ggaggtagca gtgagctgga attgcaccac tgcactccag |
| 147481 | cctgggcgaa agagtaagac tctatctaaa gaaaaaaaaa tgtactataa taatttacaa |
| 147541 | agtacagaaa atatctaaag gaaaagaaat aacatctcac aacctcatca tctagatatg |
| 147601 | actgcaaaaa ttttggcata tttcatttca gcttttaatt aatttatttt tgcagaagac |
| 147661 | atttatttca gatattctaa ctttataatc tgtagaattt taatgatatt tttgtatgac |
| 147721 | atctatcata aacatttctg catgtcattg aaatatttat aaatgttatt tttatttaaa |
| 147781 | caatgcataa ttgatataac ccttctctta aaattggtga tttcacatac ctggggatga |
| 147841 | gccgatgtga aacaaaagag aaagggtaag agatagctag tctcttgact catttttttt |
| 147901 | tttccatatg acttgaaaaa aagaacttat cttagagacc tctagaatag ttagcacaaa |
| 147961 | tagatttctc aatgtggtta agatgaaata cagatactga atttactctt ttatgtgaaa |
| 148021 | taaataaaaa ctggataaga tatatatagc aacagttttc aagacattat acctcagaca |
| 148081 | acaaaggata atgacctctg agagagggaa aacaaattag gtgagcctgt gattgcccca |
| 148141 | gtttactgcc tggagagaga ttccaggcca gggtgcagag agaagggttg cgaatggaaa |
| 148201 | ctattgctct ttctgagtta aggagagaga cctgaaagtc tgcaggtaca aagatagctg |
| 148261 | caattcatga gaaagagttc cagagaaaag aaaactgaac agagagtgag ctctggattt |
| 148321 | ctgtagtgtt cctgctgact cttctgctga atcatgatca gtgcatgtgt gtggctggag |
| 148381 | aaagaacctc tgaaaaggtt tagagggaca aatccttaga atcacatagg cctgggaata |
| 148441 | gctcctcttt ccaccagaaa gagtataaaa accatgaaat tcatgggaca ttaggtagag |
| 148501 | tacttagaag ggttttgctt cagcagtgag aaaaaattag tcctagacca aatgttgctc |
| 148561 | tgatcctaac aaaacttaaa aaatgagacc ctaaaggata aaactgtttc caggtaactt |
| 148621 | aaatatatac cagaacaaag ccgaagacta taggaatatg aaaatatcta gcagtcagta |
| 148681 | aggtaaaatt cataatgtct aatatgcaac caaatattac catgaatata aagaagcatg |
| 148741 | aaaataaata cccataattc caagaaaaat caattataca taattgcccc atcaatgaca |
| 148801 | cagatgatgt aattagtaaa caaagagcta attataactg ccaactctag ccattacaca |
| 148861 | tgttcaagtg gctagaggaa agatcaaatc acgacacaga agaaataaaa agacaataaa |
| 148921 | atatgtacag atgaaaatta caatatctga gatgaagcat aagcgagatg ggattcgcag |
| 148981 | cagattagat atagaagaag gattaatgaa catcaaaaca tgtatgacaa cagtagtata |
| 149041 | aagtctgtaa gaaaagaaat ggaaacatac tggtataagg ttttacacta tgtatgaaat |
| 149101 | ggtgtagtat cacttgaaga gagactgtga ctaaagacca ctgtaacctc ttagggaaag |
| 149161 | aaaaatatct ttttctaccc atcctgggtt cacagctgag gccactataa caaaaaacag |
| 149221 | attaataaca cagaagcata cacatttact taatataagt gttatgtgac acagtagcca |
| 149281 | tcataaggaa agaagactca aagaaacaga tctgagtatt tttatagtag gtttgatgaa |
| 149341 | gaatggatag tcatggagaa atataatggg gcatataata caatggggtt atgatctaat |
| 149401 | ggtagtaaac tgggggaaat ttagcbgggt ttgcttgttc agatttttct ccttgacctt |
| 149461 | ttgtcgtgag agacaaggat gtttcttttc tctgggtata gggagggcac ctctcacatg |
| 149521 | agggacttat gatctgcttc agagaagtgc cagggaagaa cagagtgacc gtcctgcttc |
| 149581 | tgcagttttc tcaaattcat acagcttaaa atatttaaca tgctaaggtg ttacattttg |
| 149641 | gggtagtata tcttgatacc catcacctga aaccaaccac tttataatag taacacaaag |
| 149701 | agttgtacat aatataccat aaaggtggta aaatggaatc attggaaaag tcaattcatc |
| 149761 | caaaagaagg ctgaaagagg aaagcaaaaa caaagaagag atgggagaaa taaaaattaa |
| 149821 | atggtaggga catgagcatc cattaatttt ggtatacagg aggggcttga ggggtgtcct |
| 149881 | ggaatcaatc cccctcagat accaaaggat gactgtatat tttttaaatt aagagacttt |
| 149941 | cattctttaa atattcttga cttacagttt tttaaaaaga aaaaaaatca aagcatagta |
| 150001 | tagttgttaa atcattttaa tagtatattc agtggctgaa atgacaggga gtatcaatca |
| 150061 | ttatttattc aatataaagt tatccttact gaaaaaataa gatataactg ggaaatatgc |
| 150121 | ttggatccct cacacatcca cttaatttct taaaggaaga aagatgaaac acatgtaaga |
| 150181 | acagaaacaa ataaaccatt tactgtaaca ttccaggaat tgtgggatcc ttttcttccc |
| 150241 | aagtttattt atttgcttat ctttatctcc tagtggtagt ttgtttcctt tggtagaata |
| 150301 | tatggcagtc ccacattggt gacacctggt gctcccttca tccaactgga tcactttgag |
| 150361 | attcagtttt acaccttttt agcattttct ttgtgttcat atatcagtta tgatgagcca |
| 150421 | ctgataatat tttgttctaa aacgaaacat attacttagt acttttttta ttgtctcgct |
| 150481 | gacttttaaa atttgagtga tgtacagact ttgttttttt aatgaaatat aaatattttc |
| 150541 | tcatggtttc taaattcctt ataaaattaa attaattcaa tctgcaaaaa tattaaatgg |
| 150601 | taagagaata aactcatcac ttagatgttc atattaaatg taaatggcct aaatacccca |
| 150661 | attaaaagtt aaaaatggtc taattgaata aaatacccat atccaactat atcttgccta |
| 150721 | taagaaaata ttgccacttg cagtataaaa atacaaatag gtaaaagata aaaggatgga |
| 150781 | aaaagacata ctattttaaa ctaataaaat attaattaat taattagtca gatttcagga |
| 150841 | cctttttctg aataattgat agaataaaca gacaaaaata tcagtaagga tacagaaaac |
| 150901 | ctccaaaata ttatcaatca ccttgaatta attaatattt atggggccag gcttggggct |
| 150961 | catgcctgta attccagcac tttggcaggc cttgagctca ggaattcgag acaagcctgg |
| 151021 | gcaacacaca cacacacaca cacacacaca cacacacaca cacgtgtata tatatatgca |
| 151081 | cacacacaca tcagctaaaa gcagcagaat acacattttc ttcaagagaa cacagaatat |
| 151141 | ttagcatgat atgctatatt ctaggccata aataaatctc aacagactta aaataattca |
| 151201 | gctaatacaa agtatattct gtaactacag tggaattaag tttgaaatta atagcaaaag |
| 151261 | atatctggca aatccccaaa tatttggtaa ctaatatcat acttctaaat gacccagggt |
| 151321 | caaataagaa atcaaaatag aaatttgaaa gtgtttgaac taaattaaac acacatttca |
| 151381 | aaacttttga gatgcaacaa cagcagtatt tagaggaaaa tttataatag tatagaccta |
| 151441 | tattagaaaa gaagatctca agccagtgat ctcagtttct acctgaagaa actagaaaaa |
| 151501 | caaaacaaat aaatccaaaa taagcagaag aaagtaagta ttaaagacca gagctgaaat |
| 151561 | caataaagta gaaaacagaa aaacaaaaca aaacaaaatt taataacacc caaaacttgt |
| 151621 | tattatacag atcagtaaga ttgataaacc actggtcaag actgattagg aatttatcaa |
| 151681 | gaagaaacga tttccttttt ttcatactgt atatgtagca cccaaaaata aataacttta |
| 151741 | gtataacatt tattcatcta atacagaaga cagaaatgag aaaagtggca tcattacaaa |
| 151801 | ttctacagat agtaaaagaa caataagata atatgataaa aaactcaggc caataaattt |
| 151861 | gacaacttag ataaattgca caaattactt atatgacaca atctaccaaa gttcattcag |
| 151921 | gaagaaattg ataatcttag tagctgtata tctattaaag aaattaagtt gatagttaaa |
| 151981 | aattatccta caaaacgtat tccaagctct gactgtttcc ctagagaatt gtacccaata |
| 152041 | tttaaggaga aagtaattct aattctgcgt aaacttttct aggaaattga agaggaggaa |
| 152101 | atatttccca actctccctg aggccagtgc tactctatcc aaaaccagaa aaagacattc |
| 152161 | caagaaaaca aaactacaga ccactgtatg caagaagcaa tcggaaatta aaaattgtaa |
| 152221 | aatatcattt aaaatatcag aaaaagtaat tatgaagtac ttaggaacaa acctgacaaa |
| 152281 | agtggctcaa gatttgaaca ctgaaaacta taaaacattg ctgtaagaaa ttaaagaggg |
| 152341 | cagaaataaa tggaaacctc atttgtgaat tagataaatt taacactgtg aagatattaa |
| 152401 | ttttccttaa attggtctat aattcaacag aatctcaatc aatacctcaa taggctttta |
| 152461 | aaaatgcttg caaaatttga caagctaatc ctaaaattta tatgaaaatg caaaggacct |
| 152521 | acaagaggca aactatcttt gaaaaagaag agtaagtttg gaagacatat acttgccctc |
| 152581 | agagctcatt ataaagctac agtaatcaag acagtgtgag actgaaataa agatagacaa |
| 152641 | agaaagacaa tttctaggtc atgagagtta tgtttcctaa aggaaggcag cagatgctta |
| 152701 | ttaactttcc ccgtgccctc aggatgcctt aaacagtggt tgccaaccac tagcagcttt |
| 152761 | agcaccactt ggaagctttt tagaaaagct aattactggg cccatcccag acctactgaa |
| 152821 | ccagaatctc tgtgggcaaa gcccaggaat ctgtgttttc acaagctctc caggtgataa |
| 152881 | tgatgtccat taaagtttga gatccattgc cttggccttt ccctgctaga aatcctccag |
| 152941 | gatttgggag acaggggaag aggtctggag agagtggcag aattcaacac cacagaatga |
| 153001 | agaggaaaat tgatggtctt tgtccatgga atccattaaa atatactctc attgctgcca |
| 153061 | ggctgagctg atgaataaaa aataagctaa tctcaaatca agccatcagg ctattgatga |
| 153121 | taattgtgtt ttagggtgag caaacagctt taccaagctc acacagttga gacaatttgt |
| 153181 | tgtttggaac tatcttactg taagatcctt aagaagaatg cagaagtatg aaaataaatc |
| 153241 | caggactcag aaatctttca actaaatctt taaaattctc tctctcatgc acacacacac |
| 153301 | atatgcacac atacacatat agtaagattt catgacacat gagacaggat gtgaagctga |
| 153361 | acagttcgat gaatgcctga gtggtaagat caccttgaag aaccagaagt gagggtctat |
| 153421 | tctagcbggg tatgagctac aaactcattt cttggggaac acatgaacac atcggggagg |
| 153481 | ctaagtagct tctgaggcta ctaatagaat ttcagtcatt tctcctgtca tctgaaaaat |
| 153541 | atatgatatt gaatttctaa aaatgggttt agtgtagtct agtcttactg tctaaaacta |
| 153601 | agatgtggct tattccaata accaaagtga ttccatccca tgtgagggaa aaaaaggata |
| 153661 | atggtgaatt aaaagcacct gcgtgtattt gttgctcctt tagaggagtc tctcttcatc |
| 153721 | aacgttaact ttctttccta cttttgatct ggctgctaaa agtctaggtt tagatctcaa |
| 153781 | accattgtcc ttctctgcat gatgtaatag ttacaattac agtctcaacc ctctggcatt |
| 153841 | taatgaagat gaaattgatt tctttagact gaaaacaaaa aaatcactta caatcaggat |
| 153901 | actgaatatg gtagcaagta caaggtccca gcttctagta gacttggcag actgtcaagc |
| 153961 | tcttactaag tgaccccacc ccatgccttt ttgtcttttc tgttgccaca caattacaat |
| 154021 | aatttgttct ctgaatgcca gagtactgac aaggaaagga attctgaagc tggctgagag |
| 154081 | aagtcgtgta aatctcccaa tctaggctcc attgactctt gtctctttct ttgtatggaa |
| 154141 | ctgattttat aatttctgtg gcaatgaaag actagtaccc aaaatgactg ctggtccttt |
| 154201 | gtttattgat caatctgagc atggactaga attcatcctc caattggtaa caagaaaaaa |
| 154261 | ttggatgggg aagcatacca ttggctaagg cagcacagca agtttgaatt tggctgcctc |
| 154321 | ttctttcaat attggttgac atcatcaaga gcagacattg gcgttggagt taagagtatc |
| 154381 | aagagagtta ataaatacca atttagggta atattttatg cctagtcttt atcttttggt |
| 154441 | gaagtggttt ctaatatcat ctcagactaa atcttatggg atatttctac ttgtagatgc |
| 154501 | taaggtatta agaaaaagct caaagtagtt gtgttttcct tatcttccta aaagtttaga |
| 154561 | ttaaagatgc caaaaatttg tgtgttggta tgtgtcaaag catttgaatg cccttgtaga |
| 154621 | ctattaaaac ctttgttctg taccaggcac tgtattgagt atattgcatg tatttattat |
| 154681 | tatatttagt tctcacagca accgtacaca ataattacaa ttccttcctt tcactaaggc |
| 154741 | atagggagtt taaataaatt agccacagta caggatggca taaaactgta gcagagccaa |
| 154801 | aactcaaaca tgtctctgtc tgactcaaaa acataggctc attctcctag agccaggcaa |
| 154861 | caacctgaaa gctcttgagt tgacttttct agttctgtgg atgaatgcaa tcatctcagg |
| 154921 | acccagataa acagaagtcc ttctttctta ttcgtatttc tcagtactag gccagtcagg |
| 154981 | acaaactctg ttctccatgg ccgtgatctt gaagaaattg agatttcatc caaaggaaat |
| 155041 | caggtattga aacgtgtgtt tatgtgtatt gattaatctt ctgcctgttt ctggaaacat |
| 155101 | ttgaagaaat ataacaaaaa gcaaatatcc tgaaactgcc taatgaacct gatctctctc |
| 155161 | tctgtctttc cctttctctc tcataggtct tttgcctgta tttctctggt ggaatttact |
| 155221 | aaataattat atcaggtgtc ttcttattgt acttgactgc tttcatcaag gtaatcttga |
| 155281 | ggacagagac ttcctttgtt agccagggca ctctagggga acagaaatta cacacacaca |
| 155341 | cacacacaca cacacacaca cacaggaact ggttcatgga ggctaaaaag tctcaaaatc |
| 155401 | tgcaggccaa aggcttgaga acccggagtc ctcattgtgt aagttccact cagagtctga |
| 155461 | agaggggaga agacagatgt cccagctcag agacctttag gcagagagag aaaattctgt |
| 155521 | cttgctcagc ctttggttct tttcaggcct ccagtggatt agatgaggct cacccacata |
| 155581 | ggggaaggag tctgatttcc tcagtctacc aatgcaaagg ttaatctcat tcagcaacat |
| 155641 | cctcacagac acacccagaa taatctttca ccaaatatct aggcactttg gcccagccaa |
| 155701 | atagacacat aaaattcact tccacacttt cttactaatc cgtgcattct ctccaataca |
| 155761 | gggcacccgg cctggcaagg agtaagtgct ccatatatat ttactaaatg acaagagatg |
| 155821 | agattatcct tagactatga ctcagatata gacaatcaat tattaatacc ctatcatttt |
| 155881 | tccccactct gacaacccaa actgaaaaat gttgggattg ccttttttga caatatgatt |
| 155941 | ttctctgaat gcagactcat gttttgacct tccctgtctg ttcctgttta gtattcatgc |
| 156001 | tggcttaact cattgattga tcaagtaacc attgagcatc tgccgtgtta acactctgaa |
| 156061 | caagatcctg taatatgaat ggtgtttagc ctgatgaata aagtgtggtg tctgtgcatt |
| 156121 | catttttata tatttattgt ttttaaccaa actttaccca tgtaaagaat aacattgatg |
| 156181 | gcaggaactt gaatttggat ctacgtacat gttccatttc agactcacca tgaaatgagg |
| 156241 | tgcttgcatt tttcattgct gattttacaa tacactttca caccttttgg gtaaaatttt |
| 156301 | gcaatcaatg taactgaggc agcatggtat gaaagcaacc ctggaggtgg aaatagaaga |
| 156361 | ctagaattta aatcttggtt atgccactta ttggttgtat gatttttgtc aagtcatttg |
| 156421 | acccgtgtct attcagagtt tctttgctag aatgaaggag ttaactagaa tttattgatc |
| 156481 | tcagtagtca gtctcctcag gcacagataa atcttggata tgtatcctga gatagctttc |
| 156541 | ccatttccac attgaagaca acattctatt ttagagcaaa aatgaattat attatttaag |
| 156601 | aatatgagtt tcagaattca gactcatgct tacgggtttg aattctagtt ctgccacttt |
| 156661 | cttactatgc agactttagc aagtcagtta atgtttgtga gcctcaggtt tctcaccagt |
| 156721 | aaagcagtgt gagtaataac tatcatatta tattattaca agcataaaat gaaataagag |
| 156781 | tacttggcac aaagaaggat cttaattttt agctttttaa aaaagctgta tttgtttata |
| 156841 | tgcagtatgt atatatatat tctcaattct attattatag actatattta ttatgttttt |
| 156901 | cataaagtca ttagtttcac tcaggaatta gttgaccctt gtgagataca tggtttgacc |
| 156961 | acttttcact ttgatgttct tcagaaaata agacaattag aaatctctga ttgtaatctt |
| 157021 | catgtaaaat attttacagt catggctaaa atgatcccag gagtggaatc atacacataa |
| 157081 | attcttttct ttattctaat aatgttacct ttagtgtcta tgccaagcaa gtatgttatg |
| 157141 | tgttgagata aaaattctta gtatgtttgt atgtgacatt cccaactccc atcccactga |
| 157201 | agtctatatt tacctagttt ctttcttttg ttttcctcta acattcatgc tattttaatc |
| 157261 | aatgttcttt cattttgaag cccccaataa gtttgacccc aaagactttc agtttgcccc |
| 157321 | tgctattcat aagcatactt atgacaatgc atgtctccca ttcttttctc atatttacac |
| 157381 | cgatcttttt attgggacaa atgggtttgt tttttcatgc ttgtgtttaa tatctcactg |
| 157441 | agttcagcat aagttattaa acataatttt ctgttttctc tttctccctc aagactttct |
| 157501 | ttttctctag acctttattt cctaactcca gagtatttgc ccaggtctat aggcccctct |
| 157561 | ctcttttgct ttcttaccaa cccatccacc ttcttctgtt tcctattgcc caactggctt |
| 157621 | cacttaaaca agagcatttg ttatttgtac agagtgcaac atataattgt cctactctgt |
| 157681 | ttggttgcta taacaaaata tcatagacta ggcagcttat aaacaacaga tatttatttc |
| 157741 | tcatagttct ggaggctgga aaatccaata tccaggcact actggcagat ttggtgtctg |
| 157801 | gtgagagcct acactctggt tcatagacag ccatccattt gcbgtgtctc catatggtag |
| 157861 | aaagaatgaa taaagtttct ggagtcttct ttacaatggc actaatccat tcatgaaggt |
| 157921 | ttcatcccat gacctaacaa taccattgta ttgggggtta tcttgcaaca tatgaatttt |
| 157981 | ggggaacata agctttcaat ctatagtaat gaagtaggaa attttccctg atcctttcat |
| 158041 | gggcaggaac tggagtatgc ctatttcaca gaggtcttat cagataaaaa aattctccat |
| 158101 | taaatggcaa aacaagtaac catttgggat tcctgggtgt acagtgccta ctattccaaa |
| 158161 | atgagattat tgaggctaac atgacccttt gtatacaaag acgggggcag aaataatatt |
| 158221 | tctagcaaat ccacacatct caatcacatt taatttcaca aaatttactt ctaataagca |
| 158281 | ttgttccaac taacaaacca tctggtgcta gtctaagata gagatggctg aagtgctcct |
| 158341 | gattccagta ttttaggtgt taaatctcca ttctaacatt gtcaatcctt aactggagta |
| 158401 | ctcaaatatt aactaacttc ctctaggata taaattaata tgtataccac attctatgtg |
| 158461 | aattatttta attatattac atgccatata caaattatat ataggtttag tcttcctgaa |
| 158521 | tattgcaagt tgagtctgtg agagaaaaaa ttaggatgaa ttgagaataa ctagaattca |
| 158581 | gaattctttt tcattaagtg ttgactgtgt taactcatat tcccggttag gtagcaagtc |
| 158641 | ctatgaagtg tgattttctc ctaacagcta aaaagcagaa aaaaaatgga tttattctag |
| 158701 | ttaatgactt gctttttcta tttttataga aaaaatgaag taaattattt cacttttctt |
| 158761 | gatgctatta ctattttgtc aggaagatag atcttctaaa ttttaggaaa ctatgaatct |
| 158821 | aagttctata ttgctctcat ttcctttttc tctttgtctc tcttctgttg tagcccctcc |
| 158881 | ctcaccgcta agccttcacc ctgactctac cctgccccca ctgccttttg ttctttggaa |
| 158941 | gacactcatt aacatttgct aatgtatgct aatgagcaat aattagcatc tctaatgtga |
| 159001 | acaaaagcag tgctacaaag gaagggtaaa gatgtgtaca gagttcagcc agccttttat |
| 159061 | gcttctttat gccttaggaa caatcctctt ctttcagttc tttcacaatt ctttagtgtt |
| 159121 | ttttgtttgt ttcattttgt ttgcttatcc atgaaccctg aaaaccattc ttcttcttga |
| 159181 | gttagaatat tgcaaaaatg ctacggagga cagaaagatt cctttttgtc ctaaataacc |
| 159241 | caaggatata agcacagctg ctaagaggtt ataatgcaca tttgtatttt catctggttg |
| 159301 | ttattttggt atcctattac tagaaaaggt tttaaccaga aaacctcaca caagataatg |
| 159361 | tatttcattt taccacactt atttacagtg gttgcccttt atggtggtaa ttgcaatgtg |
| 159421 | aaagcataca ctctgaatat atattatgac agcatggtta aataagaaat gttccctccc |
| 159481 | tcaaacaatc taaatgcaaa gaaaatgcaa gactcaccac ttactttttc ataaccacag |
| 159541 | agggctctaa atgtctttgt aaatagctat ttatttattg aatatgtata gttttttttt |
| 159601 | tgaaaaagcc agccctccaa accacataga gtaagagctg tttttgttct ttctgtagac |
| 159661 | tgatggtgtc gtgaaatacc taattgcagt ttctcacaaa tactccagca tgtaatttgc |
| 159721 | catttgcaga accaggcttc acatttcata tttgctcttc cagctcaggg gtggtagaat |
| 159781 | ttggaaacat accagcaacc cacttcactc agcctgtgtt taattataat ttcacgtaca |
| 159841 | ataaaagcag aaggaaaacg tgcaaaaaaa ttggtgtgca tccctttccc ctccttctta |
| 159901 | cgtatataaa aaagatttat ttccattgta aaaggataga atggggatct ttattttgag |
| 159961 | tagattttct atttttgttc tttctgtttg cctcagagtt agtgtcctct ctctgtgacc |
| 160021 | tcagagtaaa atgtgtttct ccataggctt catcctgttc tatttatcaa ctatattata |
| 160081 | tttatcaatt attttatatt gtgtttttaa taaagcagac atcagcagct atttattttc |
| 160141 | tacttctgag ggcctaaaga gtctcagaaa atgagtgtaa tctagaaggg aaaacattga |
| 160201 | agagtgacag ctattataac agttgtgatt tttgcctgcc tccctctttt ggattggtga |
| 160261 | gtcctaccaa aaaccaaaac tattattctc cttgtaattt tgaaaccaca gagattgaaa |
| 160321 | ataactattt agtatctcca agatattata atgtttgaaa atatgaccag ttttgggggc |
| 160381 | atttattaca aaagtttcca gtagggtgtt tttgaatgtc tgtgccctct ggttttcaca |
| 160441 | aaactggtct taaggaagat aagatactgg tacacacaga agaaatatca gcctacgtct |
| 160501 | gtctcattaa atcttatccc cagatacttt gatgatattt aagtgtaatg atctcattct |
| 160561 | gtgtttctca ctcctgataa ttttttaaat gtcttatagc ttacaggttt attaaggtat |
| 160621 | ttgatttatt taagaactac ataattattc tcttcattca atggcttctg aaatattatg |
| 160681 | tttaattcta tcatttgaag gacttgggat tgttataaac aaatggcacg agcttctttt |
| 160741 | tgtcctgacc tagaagtagc aaagataaag ggagctgctt agttaacctg agtgagattt |
| 160801 | aataatcttg ggtatatttt attctagagt aagaagaatt gcaccctatt acttttattc |
| 160861 | agttttgtat gcagtagctt ctgttgtcta cttcacaacc accaatagtg ttatcataaa |
| 160921 | ttcagagtgt tgggctgtat tagcccattc ttgcactgct ataaagaact acctgagaca |
| 160981 | gggtaacctg taaagaaaat aggtttaatt ggctcatggt tctgcaggct gtacagaaag |
| 161041 | catggctgct ttctgctctc cagcctcctc atggaggcct caggaaactt acaatcatgg |
| 161101 | cagaaggcaa agttgaggaa ggaggtacct cctacatggc cggagcagga ggaagagaga |
| 161161 | gaaggggaag gtgctacaca cttttaaaca agatcttgtg agaactcact attccaggaa |
| 161221 | cagcaaaggg aaagtctgcg cccatgatcc agtcacctcc caccaggcac ctcttccaac |
| 161281 | actggggatt acaattagac atgagatttt ggcacaaatt tgaaccatat cctgggccat |
| 161341 | tctctatatg gagatgatgc ctgaatatga tttggtgact cagtctagca tccaagtggc |
| 161401 | tcattgttgg gcaattcttc tttagtcttc tttagggcta attttactca ttccttttga |
| 161461 | aaattggatt gatttacttt ttgtttggtt ttaagaaagc aaaatatcta aatgctgttc |
| 161521 | ttggcatagc ttatatacat atacatgcat acacatgtgt aattttcttc agatcaaaat |
| 161581 | atgcatcccc atcattcgta ttgctataat cagaaattag taatttgagg ggcaactgaa |
| 161641 | tgaccttata cctagagttt tcagagtata atattacaca gtgtgtattc ataagaatgc |
| 161701 | tgccttttaa agaggttttt ttttaaaaaa atcatagctt attttttata gtttcactgg |
| 161761 | tctgtcctcc cttttctctc tttttttccc ccttgagaag agagatttca catttttgtt |
| 161821 | aaggggctca taatttcctt atgaaatatg acaaatttca ctttatctta aaagcaaaat |
| 161881 | attaatagta cagacagctg aaggtggtct gagttaacct gagttacaca ttttatatat |
| 161941 | atatatatat atatatatat atatatatat atatgttaaa aatatttatt tgtcatatgt |
| 162001 | agcaagacta aaatgcaaaa ttttgcttta tgcttattct tttccagtat catttactgt |
| 162061 | aattctcacc ccatatttat ttttttactt ctctttctgt ttctctcctt tctcctctca |
| 162121 | ttctttttct ttcttttctt ctccctaccc catcttttag ttccatactt ttgaattgct |
| 162181 | atagtggact caaatctaag caagaggtat attagtaagt tgttcagtct tttaacaaag |
| 162241 | tatcagtcag agaagcacag cccagggata aaccaaaagc agaaataaaa ctgaggaatt |
| 162301 | aataatctaa ttcgtgttgt tttctttaca ttataggtgg ttcatttcat agcctacatc |
| 162361 | ttcaatttct caattctcat tagatctttc ttaacagcat ataagaccat tctaaatagc |
| 162421 | aaaaatagct gtatcctttt actcactgcc catcagttca taaagccact tgaattcagc |
| 162481 | tttttgccca cacaactgca ctaaacatat gcctgccaag atcatcaata tctctacatt |
| 162541 | gtcaaatcca gtggtcaatt ttcagtccac attgtactta gcaacttatg atacgtctct |
| 162601 | gatgcacatc ttctgccatc cacaatctct gactttcctt ctacttaaga gctgattgtt |
| 162661 | catttttgat ttcttcagtt tgttcttctc ctgttcctca ccattttgag tctccttttt |
| 162721 | ctgttttgtt taccctcatt ttctttgtta tctcatctgg tcttatggct ttaaatacaa |
| 162781 | tgtttttgct gataattccc taattcatat ttccagtcca gacctttctt ctgaactcca |
| 162841 | ggctcaaata ttcaactgcc tacttaatgt catgcttgga tgtctagaca gcacctgaaa |
| 162901 | tccaacggat ctgattaaag tcctgatctt taacagctcc tacctaagct attctcccta |
| 162961 | cagtcttcca tcttcttttc ctgtaattcc attcttcagg tgctcaagca aagaacctgt |
| 163021 | tgctatcctt gatttctcta tttctctcac atcctacagg gatgacatgg gttcatttat |
| 163081 | gcctgtcatg ccactgatta acatccctat caagaaagtt tagtctgagg taaaaacatc |
| 163141 | caatttgtat gagaagggcc aacattgaca ttcttcgtac acaaaaaaga atcctgagaa |
| 163201 | gaaacacaaa agagctaaat aatacattgc tgttgcagct taggtaggct ggagaagaaa |
| 163261 | cccatacata atctcaaacc ttactgttat aaagtcattc tttttttttt tttttttttt |
| 163321 | ttttgagacg gagtcttgct ctttcgccca ggccagagtg cagtggcgct atctcagctc |
| 163381 | actgcaagct ccgcctcccg ggttcatacc attctcctgt ttcagcctcc cgagtagctg |
| 163441 | ggactacagg cgcccaccac cacacccgga taatttttta tatttttagt agagacgggg |
| 163501 | tttcactgtg ttagccagga tggtctcgat ctcctgacct catgatccac ccgccttggc |
| 163561 | catttttttt tttttttttt taagagggag tcttattctg tggcccaggc tggagagcag |
| 163621 | tggcacaatc tcggctcact gcaacctctg cctcccgggt tcaggtgatt ctcctgactc |
| 163681 | agcctcctga gtagcbggga ttacaggcgc ctgccaccaa gcccagctaa tttttgtgtt |
| 163741 | tgtagtagag gcggggtttc accttgctgt ccaggctggt cttaaactcc tgacctcaag |
| 163801 | tgattcatcc acctcagcct cccaaagtgc tgggattaca ggcgtgagcc actgcgcctg |
| 163861 | gcctataaag tcattctttt gcatcaaata gtaagactca ttaaaggcag tggtattttc |
| 163921 | ttttactgtc tacaaaccct tatccaagag cattttctct atattccttt gtgagcacac |
| 163981 | aataaatggt aattcaataa gtgaattttc agtttccaaa ataataacct ggagctataa |
| 164041 | acattgcttc aagaagtaaa tgtgggtcag agaaaaaggc aataccattc aactcttctg |
| 164101 | gccacttggt cactgtgtta tcctgaagaa gcataaacta ctttcagcat tatagattta |
| 164161 | aaaagaagcc ccagaacaac atccactttt ctgaacgact cctatgcctc tgaaatgtga |
| 164221 | cattttgctg ttgtttcttt ttactgtttt taattactga gtctatctgc atgaaatgag |
| 164281 | gatctgggtt gcctaggagt tcatctgctc ctattgcata ttcctctttt aactacacat |
| 164341 | acttcaatgc agttttgctt gctgcctcca acattttgac agacttcccc tcctcttcct |
| 164401 | tcactatcct cccatcactc tccaggagac aaggttattt ttaaagtgca tgatcaatgg |
| 164461 | gcattgggga gcagctgagg catgaagaga tcatacgatt gggaataagg tactagggac |
| 164521 | tgctgagaga aggaatggca acatgccatc tcagacattg tctgagaaag gaaagggttt |
| 164581 | gtagctccca ttcaagtatt ctgagctatc tcttcacaca ggtttttgtc ttggagggag |
| 164641 | ttcttaacat agttctttag cattgcttta agttgaagga gatataggcc agtgctgata |
| 164701 | gttacttttc aggccaaata atgttccatt aaaatcgagc ttgctctgag gatcttggta |
| 164761 | gtgtcttaaa tctcctggtc atagtgctgc tatttggttc ttgatgctta tgacaccttt |
| 164821 | gctgagggtt tgaatcaaga acaaaacaag tattatcaca atgactataa aacatgactg |
| 164881 | ttccacgatc agacaaagga atgcbgttaa gcaaagaagg cacctaagga gaatgtggag |
| 164941 | atgaccatgc acagaccaga atcactattg gaaaaccaac tcaagaggag ggactgggtc |
| 165001 | atttctgcag cagtcttcat tgcatcactg agaaattgca gctctgtttt agttctctac |
| 165061 | ttgccaccac agggaatatc ttcccttatg gacttttagg ttttatttaa tggttattta |
| 165121 | taaactattc cttctgtgcc ggagaagatg attcatgact ctagccctgc tttttctctc |
| 165181 | ccgtggttat tagaggaaac tgagttgttg cttatctctt tagcttggga taccttattc |
| 165241 | tgctcttttt atttaatata taatctttcc taaagatttc cttatatttt tgttcattta |
| 165301 | gtaggttttt ctgttttatt taattaactt tatattatca cattctagtg aaataatcat |
| 165361 | cacaaatcat cctaatacat cgtgcaaatg ttttaaaaat gtgctttggt tgtgcatatc |
| 165421 | gcaaagtagg ctgtgggtca gcatttgcta tttgtcctca gctgtttctt ctttatatat |
| 165481 | aactgataac accctgctcc aatgttaatc ttatatcatt aaaattcttt cctagagaat |
| 165541 | ccttctttga ctgaagaagc ttagtggtga cattaattgc aaataaaaga ccatgaccta |
| 165601 | ttgtagaatg tggaatatct ccttagaagt gtctgccttc attattgcaa actttcagta |
| 165661 | gtgacataaa gatctttgtc ctgtgtagtt tcagttgcag ccagcaacag aaggcatatg |
| 165721 | ttcactttga acaaaagaac atttattttc acattctgtg gctgatgttg agtgataaca |
| 165781 | tttttgcata tcctaaaatt ttttacccag atgcbgttta aaggcaaaaa gtgcttttac |
| 165841 | aataatattc tttgtgaatg gaatttacac tcttggcatg tgttgccttt tcaatatgcc |
| 165901 | catcaagttc tgaataataa cctttgacag tgagtgaaca gaaacaaaac cagaggttgt |
| 165961 | ttcatctgtt cacagcaaca ctgtttgtca tctttgcttt tttggaaaaa tgtcattcca |
| 166021 | ccttaaataa aaatatgata aaattcatgt tttataagca agttaataga cttcgattat |
| 166081 | taagaaatat tttaattttt ccaaggcaag aaacctgtga tgaatgaaca ttaagttgac |
| 166141 | aaaagaaaaa aatatgccaa taaatatatt ttttcatatt actgtagtgt caaaaatttt |
| 166201 | ataaaacttt tatatgcctt tataaaaatg aagcaaagct aagaagaaga tgctgtatgt |
| 166261 | gttatggggt gaggaataaa cagaaaaagt gtcctttgtc ttggaaagaa ctgtaaaatc |
| 166321 | acctatctcc atgttgccaa agggaatcac atattgggaa atttaggcta tattaatata |
| 166381 | atacgtataa aaataattga aatagaaaag atctggcttt aagcattttt ctaaagactt |
| 166441 | tttcatgctt ggtaaaagtg tttggaataa attattctct atttttaagt agttaatttg |
| 166501 | gttattaacc taattggtat gggcatgtgg atatagcttt attaacaatt caatttctca |
| 166561 | tgaaataaaa taacccgaca aaccccaagt ctacttattg caatacagaa tttattttgg |
| 166621 | ttgaagttat tttgaattga gctgatagct tataactttg aattgggctt ataactgtta |
| 166681 | tgttttgcaa atccctgaag attatgaaat agaaaaatct ttgcatggca ttgtataaga |
| 166741 | tgctgtagct gtatatcttt aataaatcgt gctcattttg gcaagtttat ggaaaaattg |
| 166801 | tattaactgc acaaaaacat tatgataaaa acaataaaag taaaaaccac ttactaacaa |
| 166861 | ttgtacaggc atttaaataa ttgctgtact gttttctttc ctcaacagta caaatcaaag |
| 166921 | tggaggaaaa agaagacgag actgaggaaa gctcaagtaa gtggtgatgg gccacttggg |
| 166981 | atacatttcc tatggaatac cagtaaactc aaagaattta tcctcttgtg gacttgagct |
| 167041 | accatatgta agcagaagtg tgtgtggata acttttcatg gtctcacagg aggaatcaag |
| 167101 | ttcagcaaac agaatcccca ctctagagtc tatccagttg gcactataag ggccaagact |
| 167161 | gtgttccctt gattgcttgc tgaaaaatca acaagcaaaa gacatgttaa taggagaaaa |
| 167221 | ggcatataat ttcatagaac ttgtattcat taaagcctta ggatgaagac ccaaagatag |
| 167281 | agaaaattgt ccatttttat gcttaggttc aacaaagtgt ggatagcagt gtagaaatat |
| 167341 | gattggacga aaagggtata atctaatgtt tacatagagt ggggaaacac aacaaggcct |
| 167401 | gtctgcctag attcttcttg gcctctctaa gcatgcattt ctttcttctg ggtatggggc |
| 167461 | agggaccctc tttggaatga gggtcttatg atctacactc aaacaaggta ggtcggatga |
| 167521 | tttcttgatg accagttttt acacagacag ggcagaggga atgttagagt agtattttta |
| 167581 | ggtttcatgc atttgagaag aatgtttatt ctgttgttat tgggtagaat gttctgtata |
| 167641 | tgtctgctag gtctgtttga tctataatgt tgttcatgac tgctgtttcc ttattgattt |
| 167701 | tctgtctaga tgttctatcc attatggaat gtaatgtagg gtattgaagt ttcctactat |
| 167761 | aattatattg ctgtatattt tctctcttga gtttggttaa tgtttatatt taggtgctct |
| 167821 | gatgttggat gcatatatac ttataattgt gatatcttcc tggtaaattg acccttttat |
| 167881 | tactatttaa tgcccttatt tgttgcttat gacagtttta tactaaaagc atattttgtc |
| 167941 | cgatgtaagt atagccaccc ctgttctttt ttagctacca tttgcatggc ctatcatttt |
| 168001 | ccgttccttc actttcaccc tatgtgtgtc cttaaatcta aagtgaatct tttatagtta |
| 168061 | gcatacagtt gtttcttttc tttggtttct tttttaattc attcagccac tttatgtctt |
| 168121 | ttgattgaga agttcaatcc acttaaattt aaagttatta ttgatagagc aagactaact |
| 168181 | tttgccattt tgttcattgt tttctgtctt aaagctcttt tgtccctttt ttatctcatg |
| 168241 | ttattctcct tcatatttta ttgattttta ttatagtgat atactttgat tcctttctct |
| 168301 | tttcttttgt gtgtcttcta tagaaatttt attgtggtta ccatgggact catgttcaac |
| 168361 | atcttataat tataaaagtc ctattttaag tagaaaacaa tttaacctca attgcatact |
| 168421 | aaaactctac acttctactt tccttgacac ttaatattat tgacatcttg agttacatat |
| 168481 | ttttatatta tgcatccatt aacgtatttt tatagttact gttaatactt ttttactttt |
| 168541 | ataatacaat taaaagttac caatatactg tcattaaagt attatagtat cctgtatttg |
| 168601 | tctacatatt tacctttacc agacagtttt atattttcat gtgattttgt gttgctcttt |
| 168661 | agtgtcctct cttttcaact tgaagaactt cctttagcat tacttgtaag aaaagtctag |
| 168721 | gggtgattaa cttaggtttt gtttgtctga gagtctttat ttctctgtca tttataaagg |
| 168781 | acaaacttgc tgagcatagc tttcttggtt ggcaggtttc ttctttccaa cacttttaaa |
| 168841 | atatcatcct actttcttct ggcctgcata atttctgcta agaaatgata gtcttatgaa |
| 168901 | ggtttccttg tacatgacaa gttgcttttc tgtttctttc aaaattctgt ctttgtcttt |
| 168961 | gacttctggc aatttaagta taatatgtat tggtgtggat ttatttgggt tcacataatt |
| 169021 | tagggtctgt gggcttcctg aatctgaggg tccattttct ttcccagatt tgggaagatt |
| 169081 | ttggttatta ttttctttga atagtctttc tggccttttc tttcttttat tctccttcag |
| 169141 | aactcccata gtgtatatat tggtctgctt gttgatccct cataaaactt tcttgacttt |
| 169201 | ttcttattct ttttatggtt ttgctcttct aactataatt tcaaacatcc tatttttcaa |
| 169261 | tttggtaatt ctttcttttg cttgatcgag tctgcbgtta gacctctgta gtgaatttct |
| 169321 | gttactctat tcttcagtta ttgtgttcag ttattgtctt gtactcttca atatttatct |
| 169381 | ctggttattt ttatattttt atttctgttg aaactcatac tttgttcatg catttttctt |
| 169441 | ctgaatttgt tgagcatctt tatgagttat ttttaatagt ctgttaagta attcatatat |
| 169501 | ctccattata ttagggctgg tttctggagc tttatcttct gttgtttggg gtatgttttc |
| 169561 | ctgtttcttt atttttcttg attttgtttg tttgttttgg tatccatata ttagaaaaaa |
| 169621 | cagattcctt tcccagcctt caggagaagg attagccttg tacaggagaa gagtttcacc |
| 169681 | aatgaggcag gccagagatt cttgggcctc tcaaacattt cctgtgtatg catcgtctct |
| 169741 | ggacttgtgt gtgtaaattc tcaataagag ggatttttca gttgactttt tctttttaag |
| 169801 | aattcataat ctcttgttcc ctccagtgtc cttctgtcat aacatgtgtc ttctgaggaa |
| 169861 | gcagcatgtc ctgagttctt ttttttgttt ccagtagtcc ccaggcatca acagtatgct |
| 169921 | gggtcctgtc catgccctga gactggtcat tcccttaggc agcctcctga gaagtctgaa |
| 169981 | cacagggtat atatttcagt cttttatttc ccatttcagg ggcaagtcaa gggctggaat |
| 170041 | tcttgccaac tgtgtcatgc tgaactgggg gaaggggctc tggtgaatga gtacaaacta |
| 170101 | attcaaaact tcacctttgt tctccatggc cctgggccat ttagaatatg ctgggtccta |
| 170161 | ttagtgctct aggagacaag tgggacagaa gccagtccag tcatttttta gaaaagttgg |
| 170221 | agtgttagat gcactatcca actgtttttc tccccagaga ggtgcagatt tggtgtttat |
| 170281 | catctggtta ttctgtgcta aattggggga gtggctattt gagtgaggca tactattcaa |
| 170341 | acggctatct ttgctctcat tggttcctaa ccagaggtct tttcctgtca gtgctcagat |
| 170401 | tctggcaaga cagaaaccag tcctttggga acctccagaa aaatcagaat gttgaacaca |
| 170461 | tggttcagtt gttttctccc ctccccaggg agagactggg agatgatggt tttctcccag |
| 170521 | ttgtatggta ttgtgttagc agagagggat tatggtgtga gggtgtgtca gatttttcta |
| 170581 | ccagctacct agctgatttt gtgttcatct agggttcagg cacctttcaa ctagtttccg |
| 170641 | aatttctcac gaagggagct tatctccaca ttgtagttga acttttatgt ccatggaggg |
| 170701 | aaggcgggtc cagggcttcc tattttgtca tcttgttgat gtcatcccag tagtttagtt |
| 170761 | ttaatacaaa aaatactaaa attcagagta ccaagtagct gcttgggttt gtgagttatt |
| 170821 | agtgggtaaa ttgtttcttg cctcctgtca agtttttgtc ctttctttaa ttagtgacta |
| 170881 | atgtggctaa taaaagcagg gtaaatattc agaatgccat gatggggttc aaataacata |
| 170941 | catttgccac aatattaaac aaacagaaac tcgttcttga tttggatgac agaatatata |
| 171001 | tacagttttc caagcccagt tagaaaagtt attatgggcc gggtgcgata cctcacacct |
| 171061 | gtaatcccag cactttggga ggccaaggca ggtgaatcac ttgaggccag gagttcacga |
| 171121 | ccagcctggc caacatggtg aaaccccatc tctactaaaa atacaaaaaa ttagctgggt |
| 171181 | atgatggcgc acacctgtat tctcaactac tcaggaggct gagacaagag aatcgtttga |
| 171241 | actctggagc tggaggttgc agtgagccga gactgtgcta ttgtactcca gcttgggtga |
| 171301 | tagaacaaaa ttgtgtctca aaaaaaaaaa aaaagtgaag ttattctgtt ttttactctc |
| 171361 | tgctacctga catttagtaa tatatgtaat atttagatct tatacctgaa atatcaataa |
| 171421 | aaaagtttta acaagtggta attaaagata attttgaaaa aataaaatga tgactcacac |
| 171481 | gtatgtgaaa agaacatatt taactaataa aacaacttgt gagatgctat aatcagttca |
| 171541 | aaggaacgtc caaagaatag atacatttat agataataaa tattgaaatg attgtacaaa |
| 171601 | tgaaggcaaa gttgtttttg aaagggggct tgtctctcct ttggaaagag ttcatttgga |
| 171661 | tgtctacaga taaaaagtgt tttgtattgc tatatatggt tatgtataat tttcaaagtt |
| 171721 | gtcatatagt tctcataaaa tcagaatcag ataacacaga aaggtatgct gcagataatt |
| 171781 | catagttttc cattgaaata taattttttc tctggggtag cctctattta agagagtaat |
| 171841 | gataactgta atatttaatt ttttacagta gtttatgcta aatgttagaa gttaggagca |
| 171901 | atagaaatga aactggaata gtaatgttat gttataaact ttgtgaagga aattttatct |
| 171961 | taattatctt aatttatctt aattatctct ctattcttta cctggaagca tcctaaaaag |
| 172021 | ttatgaacac atgaggcatt cattgttgtt gatgatgaaa caaaataatg ctgtcattat |
| 172081 | tctcaatttt acattaaatt tatgttacct atttctattc ataagaaata aatgatcaag |
| 172141 | caaatgtgta tactactttt ttttttaaag aaaagaacaa aaatattgag gaaaaaggag |
| 172201 | aaaaatattt agaatcaaga atgaagaaaa tttaaattga gaggaacctc aagggttgaa |
| 172261 | tgaatttctc caaaattatt ctagtttgta gcacctcttt aacgttcctc ttctttgttc |
| 172321 | taagatagaa gtagtaataa atatgaagtg gttaatcact caacaattat gtaatggaat |
| 172381 | ggtaatctct aaacttggac ttatttgaat ggtcttagag gtcatggtat gatattaacc |
| 172441 | accaagctat ttagttactc aagtaaatga agaccagaac ttcttcaaaa acttattaaa |
| 172501 | atttgggaat ccacattcac ctatttgagt cggtgaacca caatggaaat ggaaatctag |
| 172561 | atacatttat ttaaatgatg ggctatgaaa tatgtattcc atgatgcatc ccatcacgat |
| 172621 | gtggagaatt gctagactgt gcbgtcagat gtgtaataat agttattaaa aactaagaat |
| 172681 | aagcttggta gtgggaggaa gcactttctg acattactca ttgaatcaag tgctatgttt |
| 172741 | aggtgaagag gaagaggagg tggaagataa gctacctcga agagagagct tgagaccaaa |
| 172801 | gaggaaacgg accagagatg ttatcaatga ggatgaccca gaacctgaac cagaggatga |
| 172861 | agaaacaagg aaggcaagag aaaaagagag gaggaggagg ctaaagagag gagcgtaagt |
| 172921 | tagttctgat attctttcaa aagttccaat gctgaagaag atcactcctt tcagatactc |
| 172981 | tttgacctta aaattggtaa ttaaagctac ttttagaaag agagccttaa tctgatgatg |
| 173041 | ctattttatt ctacttaatt aaatgtattt taatggttaa aatagaattt taaaatgaat |
| 173101 | atatattaaa aatggaccat gagaaattct cttatgaagg atctgaatta tcataggtcg |
| 173161 | ttgacatatt acagttaatt taaagatttt aaaatttccc cactaattgt atgcattgtt |
| 173221 | atctaggtta agtagaaact cctaaatagt gagcaaacat cactttatct tacagagcag |
| 173281 | gggttggaaa attatggcta aatccagccc aagaggtaag aatggttttt acagcttcaa |
| 173341 | agggtcatta ataaaaagca acaaatatgg gacagagttg tacatctcac tcaaagctta |
| 173401 | aaatattaac tatttggccc tttatagaaa gaaagtgtgc tagcccttgt tacagaggat |
| 173461 | ttgggttgtc attttctttt taatacaact caatatcttt tagttccacc aggaaaacat |
| 173521 | tttagtaaac gctgactttg tgtagaataa tgcattaaat gcbgtttagg aaaaatccaa |
| 173581 | gaaaatactt ttcttctttt tgctttttgg aaatttgcag atagcaggca ggtaggaaaa |
| 173641 | atgtacgtgt aaaacacctc taattaaaga gaaaacctag accccttgga aagaatgcaa |
| 173701 | gagaacagcc aacctgttcc acaactcaca ggtaataggg ccatgcgagt cgccatcagg |
| 173761 | tggtggaatc tcctccaaac actcctagga ctttgaagca tgaggaactt tctaagatgt |
| 173821 | cctcccaaga tgacacactt ctatactcaa tagctctaac tattgtgtta ttccttataa |
| 173881 | atgattgtca ttaaaaacaa ctgaatgaaa aatttgtcaa gtagagaagc ttagcattaa |
| 173941 | caaaaaatgg tttcttttag aataagaata acaccatcta cttcatgtct aagttttcct |
| 174001 | cctcctcttc cccagctttt cctttctccc ttttgaatac caagacaaaa cttgctttta |
| 174061 | aattttgact ctagtatttt ttatttatat ctgcttttaa agtttcttta tgctttattc |
| 174121 | ctttcaaaaa taaaatgcaa cacattttat gtcccatgta ttactatgat tgttagttcc |
| 174181 | attattatgt agtaatagtt cctatttagc aaagcttatg ctttccaaca gtggtatttc |
| 174241 | attgagaaaa catctccaat tgatgtatgc atgatatagg ttgtgttcca aaatttgctt |
| 174301 | ttcctctcta tttatgccgc aaaaaaatcc ttttaaaaag atgagttgga caggaattcc |
| 174361 | tctgctctct tcgtctgctg atggccctca tggcaactgc tcaacttcta ggaaatgggg |
| 174421 | ccatgtgaag caactggatc ctgtggctat gacagtgtct cttcctagct ggcctcactt |
| 174481 | tcattttgat cttgagaatc aagatccctt acctcccact cttccacata acccaactct |
| 174541 | ctccataggt tttgcaaatt gtatttttgc tgcgacaatt tgtgcatcta ttataaatag |
| 174601 | tatcagaaat tagttgtgat tattgatagt tctgttctct attttagagt ctattttcta |
| 174661 | ttgttcattt tgaagataaa catctttttt ttaaaagaaa atcttagata atatttttga |
| 174721 | gaaagattag tagccaaatc agggcacatt tatgtaggtt aattaattca gggtattttt |
| 174781 | tatttaacta ttcaagtaat gcctcaggga atttcccttg cattgacaca acatttgaaa |
| 174841 | ccaactaaaa ccaaggttgt aatgctaact atctttggag gcagttaaaa aaacactgcc |
| 174901 | ttgttagaca ttttggagta tttccagtaa tattacaggc ttttcctgac ccagttttaa |
| 174961 | gtggataagt aatatattca tagcagtgag aaattcagca tattatgcct tcttcttcct |
| 175021 | aacaactgtt gtttaaatat atcaaactta agatagaaaa ccattcttgc acagattagc |
| 175081 | ctgaaaattt agatgaggca tgcctatgcc ttttaatatg attagccctt tctttgagtg |
| 175141 | attctagaaa agcaggtttc ctgtaatgct gattagaaaa gtattttaat taccttcata |
| 175201 | tttgagggta acttatgtgt caacaactgt accctgtaac acagcctgat cctcctggtg |
| 175261 | aaataaacaa ttaacaacag agacttaaaa gatataccaa tctggggtca tttagtacag |
| 175321 | gaataaacgt ctttccatac cataataatc tcagaggtag ttgttatatt ttagtgtact |
| 175381 | ttgagcactg ggtttatgat gataaccctg agcaatccag aaaagttttg tatacatatg |
| 175441 | ttcattcaat aagttattta cccagctcta cttttgtgca acctaatttg cttatatctt |
| 175501 | tgggatactt ggatatgaac atgtaattgc ccacaatctt gcaatcttca aaagtccata |
| 175561 | atatagtaag ggataggcca cttagataca aattattatg acataagaaa gtatatgtgt |
| 175621 | cccagagaaa tacaaacaaa gtagcttgga gtctcagaga agtgaaaact gttctcacag |
| 175681 | ggatagttag aaaagggatt cttaaagaca tttcatatga tttttaaagg acttgaaatt |
| 175741 | tggacaagct gaacttataa actatttaat tagtattaga attgtttcta ttaaagggtc |
| 175801 | tctgaaagtt ggcctgtagg tttagttacc tggcaaatcc acacatcaaa tagataattc |
| 175861 | tttcattctt tggtgatgtt ggattagaga tgcbgtttta catgtgattc ttaatggaag |
| 175921 | ttcagtagtg taaagcttta aggtaattat atgtaaatat catgaattat tttgaaatgg |
| 175981 | ttggcaagtt aaaggcttaa catatcaagc aattaaatta ttaatcataa agattttttc |
| 176041 | taattgactt tattactgat aatttcttgc catctgtttt attttatttt tgctagtttc |
| 176101 | tgaaaatatt tcaataaaac tgctatctat gtaatttaaa gttattccta tgtttgcatg |
| 176161 | gaaacaattg tgatcatttt aattaaaaca catctttacc tcctaagaca aactaaccca |
| 176221 | catatcattc taattggcaa attaaaaaaa aaaattgtgg atatagatag agtaaaaaaa |
| 176281 | atcctgaaat attttatgcc atggctacac agcatcatag gcttttatat gataaacacc |
| 176341 | aaataatgaa aatagaaaca acccaatggc tatcagagat gtatcttaga agagtgtact |
| 176401 | tccctggttc tcttgaacca aaatgattat tctaagcaaa atgtttgaat tgtccaaaaa |
| 176461 | acaaactgtc aataggaagt gttattttaa agggttaata tgaatttttg tttcagtaat |
| 176521 | catagcatga ttaaaaacta taaattggtg gcaaataaag gagattgaaa gtcattttgt |
| 176581 | aaggtgaact ataaaactgt ggatatgtcc ttttcctcaa ctagaacttt aaaaagcagc |
| 176641 | ttttgcctta tttctactgt atctagtcat aaattatttt tctgagtaat actgaattgg |
| 176701 | attacaattt ttgttattgg tcaatatcta gtgaggggag aaacttcaac agttaattga |
| 176761 | acagagagaa tttaataagt gaattgttag gaggtataaa tgttaattag actgcagaaa |
| 176821 | aggtaaaaag agaacactaa agtatcatag tgacggtaac tactggaagc agctaccatc |
| 176881 | ccaagggctg gaggaacaat ggaaagggtt gaaacgaaaa cactgtagcg tagaggaaag |
| 176941 | accctaggag ctaaaactca ggcctctgca gaggggctga tgctctgtgg tgctggtttc |
| 177001 | tgtgggagag gtgatgaagc tggttctgct agtgttggta atattggtga taaggattca |
| 177061 | cttgcagtat ggcaaggacg ctcagctcca ggagtgaaga agagatgcta aggaggaagt |
| 177121 | gtcaccccac aaagcaaata tgaagcagag aggaagccac aggaaagacg gagaccctct |
| 177181 | tcagtatccc ctattgtcag agtatatatt gacccagcta acaaagcaga aatatgactc |
| 177241 | acaaaatacc agccccagca ccacaatatt aaagtgtagg agggtgtgtt tgaagttggg |
| 177301 | acaatagctt aaaaactgaa ataatctatt accaaaaagc tgatctctac aatgtggtat |
| 177361 | tgcatgcctc gatttaaaat tatgttgctc ttgtttagat tttgtttcct ttgagttctg |
| 177421 | gaccgcatag tgttttcgta atactaggaa cacagaaaag aaaagctaca tctcatgctc |
| 177481 | agtaggaact aaattccttt gaagatctct tcaaaggatt cacttccacc aaatatattt |
| 177541 | caaggtgaat tttaccaaat gaagttataa gtttaattaa cagataacat taagttacct |
| 177601 | ttgagaaata gatttttatt tttcccgatt tcaatttttc tttctttctt tctcttgaga |
| 177661 | cagggctaac aaaattttta agggcaaaga catcttcacc cctaatttat tatccttatt |
| 177721 | gagaaataaa atatttaaac gaaatgtaga attgagggaa ggtattcaag ggaacaaaga |
| 177781 | agagagggaa atatcttgat atatctgtaa ttattctttc cacagatttt ctggttcaga |
| 177841 | gagtttgagg ctctagacat aaaagaattg cttagggcgg gtgcggtggc tcacacctgt |
| 177901 | aatcccagca cattgggagg ccggggaggg tggatcacct gaggtcagaa gttcaagacc |
| 177961 | agcctggcca acgtggtgaa actctgtctc taataaaaat acaaaaatta gccgggcaag |
| 178021 | atggcagatg cctgtaatcc cagctactgg ggagcctgag gcaggagaat tgcttgaacc |
| 178081 | tgagaggtgg aggttgcagt gagccgagat tgtcccactg cactccagcc tgggcaacag |
| 178141 | aacgagactc tgtctcaaaa aaaaaaaaaa aaaaaaaaaa gcccggctta tgcctgtaat |
| 178201 | cccagcactt tgggaggccg aggtgggcag atcacctgag gtcaggagtt cgagaccagc |
| 178261 | ctggccaaga tggtgaaacc cccatctcta ttaaaaatat aaaaattagc tgggctaggt |
| 178321 | ggtgggcgcc tgtaatccca gctactcggg aggctgaggt agattgcttg aacctgggag |
| 178381 | gcagaggttg cagtgagcca agatcgcacc attgcactac agcctgggtg acaagagcaa |
| 178441 | aactccatct caaaaaaaaa aaaagaaaag aaaagaaaaa aacagaatgg cttagattca |
| 178501 | gattcaggaa ggcaaacact actgcttaaa gttataatag ttccagtaat cctgcatcag |
| 178561 | tgttcagatt tgagttctca tgcttatggg tcctaatgtt gactgcatat ggttacattt |
| 178621 | aaaaaaaatg agctaaatat ctgatacctg ccttccttaa gttccaaagt caagcaaagc |
| 178681 | ttaactttat taaggtgttt cttttttact tttaaagaga agaagaagaa attgatgaag |
| 178741 | aggaattgga aagattgaag gcagagttag atgagaaaag acaaataatt gctactgtca |
| 178801 | aatgcaaacc atggaagatg gagaagaaaa ttgaagttct caagtatggt gccacttttt |
| 178861 | ataagtagaa acactttccc tgatattgat tttctaaatc ctctgaatat tccatatata |
| 178921 | tatatatata tatatatata tatacacaca cacacacaca tacacacaca cacacacaca |
| 178981 | tacactgtat atatagtata tgtaatacta tatatatcat ttatatatga ctcattatat |
| 179041 | ataatggtca cagtcataaa catgtatatc atatttctgc atatataccc aaatatatgt |
| 179101 | atatttacat atatctgttt cttatcacta gagagactgg gctaatgatt ataaattgga |
| 179161 | agcaactctg agaaattatt tagagtcttt taaattcttt ggtcatcttt aatcatttgt |
| 179221 | tccttaaact ggagtttcct tagcttaata catttgttac catctctttg aaagagataa |
| 179281 | tatatttgaa ttttacaagt ttgtgtggat tgtgcactct tgtttctctt cagggccctg |
| 179341 | gtctcaaatg aacttttcat gtgacagctt acattaaagc acagagaaga tgctaggcca |
| 179401 | acagaatagt aaataggatt ccaattaaag gttatgctaa tagctattcc ccgaacatgt |
| 179461 | cagtgaccca atttcagtct tatgttgatg ctaatgtgga cgcgaacgca gtcagagcac |
| 179521 | acagatttat aaactcttca tatgaaaagt caaatgatta tcctattctg ggggatggga |
| 179581 | agattcaccc ctgaggatca cactatattt ccctgccctg gtggttggga gaggaggaaa |
| 179641 | gggcagggaa aagggaaact gtttgtgata acagccatgt ttgcatctcc tagttttgcc |
| 179701 | aaagattgca ttcttccata aatcattttt ataaatagta gtaagtttta aaaactatcc |
| 179761 | cttcacaagc ctatttaact agtaatgctg taaaaatgat agtatagtat tattgtctct |
| 179821 | gatgatgaaa acaagaactg aaatagctat caggataatt cacttctagt cttggttctg |
| 179881 | caagagcttg tgtgctattt aaaggtatcg cttaatctcc tgaagcctta gttacctcat |
| 179941 | atccaaaata aagaaagata ttctatatct tctctgtgcg cttgaagcgt agccatcatt |
| 180001 | tatagtattt ttgttttgtt ttgtagagta aggttttcca agttctaaac aatggttttc |
| 180061 | ccagaaaact tttgcaacac cacaaaattg cagtctggga actccctttg catgctcatg |
| 180121 | tacacatcca tcataaatga aggcaaaggc aagcagcatc ctacgttcca cagagctaca |
| 180181 | aattttgtgt atgcatgctc atgtgtctgt acattaaaat aattttcatt tagcgaagtg |
| 180241 | ataatgatgc taaattatag gttttaaaaa tattcttacc tggcaaaata gaagtttggc |
| 180301 | aaccctatgt gggcctctca aatatatttg aaatattaat gacccataaa gtccccaaac |
| 180361 | ttgggaactt cagataacta tatatagaaa gtttaaaatt ggagcaatat tgtgaacttc |
| 180421 | caaaatatat gattgaataa aaattccaag gactaccttt cctttccaac tgcatggagg |
| 180481 | tgtagaaata cccccctggt ctttgcccgt atctctcgtg caggatcgtg gaggagacag |
| 180541 | cagcttcaga tttgagttag gatctcagat cttccattta atagctgtgc acatttgatc |
| 180601 | gagttgtgta gtctctctac acaactcagg ttccttatga aattgtacct tattgacaga |
| 180661 | gtttttggaa ttataaaatg agataattta tgtaaaacat gttgccagaa cttggcacat |
| 180721 | agcbgggaaa cctaagttgt agttattact tcatctcaga acagacttga tgcccaattc |
| 180781 | ctgaagggtg acaagagaga tggagagaat ttgggacctg gcaagtctag gtgggagcag |
| 180841 | acctagtcac aatcagaccc cagaagcctt gtgggatggt gacacattgg taccagtttg |
| 180901 | gataaacaat aagattttga ggatgcaaca gaaggaagta aggcatttga caatttagca |
| 180961 | aaatccagga ccagaccgtt ctcagatctt ctaaaacata gccatagttc tgtggcagat |
| 181021 | ttcaaggtct caggccttgg tctggagtcc aagagttaag caaattttag caatggggag |
| 181081 | agataggcat tagcattgga aagaaggaca atacgagccc ttagtacgaa agcagacact |
| 181141 | gacaataagg agaccgcacc tgactctaat ctagacatag gtttttttat ttggcccaca |
| 181201 | tgtgttttgt ttctttttct tttatttttt ttaaccgtgg caatatatac aatacaaaat |
| 181261 | tcaccatttt aaccatgaaa tcgattttct ttatcataat ttttttcaat atttttaaaa |
| 181321 | atttaaatta cttttttttt ctcgagacag ggtcttaact ctgttgccca tgctggagtg |
| 181381 | cagtggtgct atcttagctc actgcagcct caatctcctg ggagcaaggg atccttctgc |
| 181441 | ctcagtctac cacgtacctg ggactatatg tgcacactac catgtttggc taattttttc |
| 181501 | tttttgtgta gggatggggt cttactatgt cgcccaggct gatctcgaac tcctggcctc |
| 181561 | aagccatctt cctacctcag cctcccaaag tgctgagatt ataggcatga gccactgcac |
| 181621 | ccagcctcaa tcttttaaaa gtgggagtaa aatattcaga tgttcagctt ttcatgaaca |
| 181681 | agtggaagat ttggtcctac attcttccat cacagtaaca gctaggacta agcacctggc |
| 181741 | ctctattaat ggggcattcc tttttcaatt tgcaccattc tcaaacaatc catattactt |
| 181801 | gtttatgctg cttggctgga ccctgtagac attcagattt gctgcctcct accagtgcag |
| 181861 | ctggggaaca agctaggcat gttaccaaga cggtgattca gatcttcaaa gccaaagtca |
| 181921 | gctcacagaa tggaagcaca aatttagtcc cagaaaagaa acaactgtgg cttctcacat |
| 181981 | gtcagcaagg ctcacagtct ggtgatgatt ttccatggcc agaagtggtt tctgccttgt |
| 182041 | ggccgcacct atgggttcca gctggtgcca tggccggggc cagcctaatt cttttggttt |
| 182101 | cagtctccgt gatgaagttg ttggtactta agtgcctgac ttatctctct ttgaatgctc |
| 182161 | tattgagctt tttttgaatg ttctattgag cttctcccca ccagattcca actacattat |
| 182221 | tagaacaagt ggtcagtact tcacagaacg tgcaggtaaa tgtttctcta ccccaatgcc |
| 182281 | accaatgctt gggagtgagg cagctttccc tctacccttt atttctttca gagacatcta |
| 182341 | actttgagag cgtgtttcta aggattatgt tattaatatt ccccaaatta gcctgcatca |
| 182401 | tcgctcctgg ctaagtctgt gaaacccaag atactaagct cagtgtaact gaaagagatg |
| 182461 | ttttgatcac agctttgaat ctgtgcctgg gttcgaagcc ttcttgttct ggacttggag |
| 182521 | aaagttttga aacttctaaa agatatttta gacagtgtca gggttttaag atatatttta |
| 182581 | gagtaagcct caggaatggc aacttatggt tctgagggtg ttatgggaga ctcagagata |
| 182641 | gttcccacat ttttaaagag catctaccat taggaacccg agcacactca gggcttagga |
| 182701 | tcaaaagatg gttaatataa gtggttgcta cataggcagg cagctctagg aattggttgt |
| 182761 | gaatccatat taatcctcaa acatggctca ggagctagag ttcagcattt tcaagatagc |
| 182821 | agaattggct ctatacagct gaaaggaagc catctccttt tcatcatcac tgtggaaatt |
| 182881 | gtgattttca ttctatgttt tattgtatat caatacaatt tcacacattc ctgtagcctt |
| 182941 | aaacctactg aatgataatc tcttggtgga aaggcaggtg tgtctggccc agaccagaaa |
| 183001 | tgtatatttt tattttttga tctaaaaatt actgatatat agtcagaatg aaagctgctg |
| 183061 | ttttcaattc tgagagacag aaagctccac taaacagaat actcagctct acagatgatt |
| 183121 | tatacaatga ggaagagtgt gtgtagggag ttggaggggg gtaagggaaa cagtgtcata |
| 183181 | ttttccaatt atttgaaagt caatttctat attttattaa tcacatcatt taaaaatatc |
| 183241 | cattaatgag aatactaagt ataatctgtt tttaagctgt tcatgggttt aattcagagg |
| 183301 | ctgtatgact agatctttcc tacctataag aggtcgcagc acttacctga tagcagccac |
| 183361 | cacaagtgaa ataaaatacc caggtagaaa gtaacaggtc tacttattac ttgtcttgaa |
| 183421 | acctaagact tttaactgta tcagaacatt atatgtggta gattgaaagt gctcatgact |
| 183481 | aaacctaaat aagcaaccac cttattttgt tacagtagaa taggttttag actgaaaatt |
| 183541 | gagacttgga ctttgagcta agtgcttcct ataacttctc tttgaacctc catttattca |
| 183601 | tttataaaac agataaattg gattgtggac catggtcttc aaactgctat cctccaaagt |
| 183661 | caagcagttt ggtgaaatca aatcagggca aaggaggcag aggtcgcagg gagagctact |
| 183721 | gggccacaat gccggcttca aaaacagacc tatggtttct ctcttctaca cagtgtactt |
| 183781 | ccatataaag cattgattgg aagaaagaat gcttctgtgg ctattaaaat aaaaaacagt |
| 183841 | tttaaaaacc cacttagctg gatatttaaa gaaacttatt ttggagaagg gacagttcta |
| 183901 | acatttcatg agtctacaaa ttaggataca gaaacactcc aagtatactt ttgcagggaa |
| 183961 | ttggcttttg gatagacacc attttaaaat gatttatttt gataacaaaa atgtttattt |
| 184021 | agctattata ctgactactt taatttctga gctttgtagt accctgacct attgtttctg |
| 184081 | ggagttgtcc attggctggc taggcctggt gatttattaa tgagacaccc agtaaagcca |
| 184141 | ggaaagttat cctcagattt cattcacact taaacaggtg cttcaaactg tcagctggcc |
| 184201 | attaaggtaa cattcctcct tactcaatct cccttgatct tttcacactt cttttcattt |
| 184261 | gtttgtttgt tttttatttt gttttatttt ttagttggga gaatgaatac atttttagga |
| 184321 | aagtgaaaac agaccatggt tgatttcctc taatggagct gttgggaaaa ctttgggaaa |
| 184381 | actatttatt tggcttccat tctcaccctt tctctcctgt tttcttgtag cttaagattt |
| 184441 | tcacaggcaa gaatcatggt ttatacttta gtttttctct catctgtcat tgtgaaggaa |
| 184501 | taaaagatgc tatacaagag gacatttaag cgtgtgaaca cacccaccaa cataccctca |
| 184561 | aaccattctg gattattttc ttttttaaat tttatatttc cataagtttt tggggaacag |
| 184621 | gtggtatttg gttaaatgag taagttcttg gggaacaggt ggtatttggt tacatgagta |
| 184681 | agttcttctg tgatgattta ttagattttg gtgcacccat cacctgagca gtatacactg |
| 184741 | aacccaattt gtagtctttt atccctcatc ccaatcccac cctttcccca gagtccccaa |
| 184801 | agaccactgt atcattctta tgcatttccg tcctcatagc ttagcttcca cttacgaatg |
| 184861 | agaacatatg atatttggtt ttccattcct gaattacttc acttagaata atagtctcca |
| 184921 | gttgtatcca ggttgcbgtg aatgccaata tttctttctt tttctttttc tttctttctt |
| 184981 | tttttttttt ttgagatggg atcttgctct gtcacccagg ctgtagtgca gtggcgtgat |
| 185041 | ctcggctcac tgcaaccttt acctgccagg ttcaagcgat tttcctgcct cagcctcctg |
| 185101 | agtagcbggg attacaggca tgtgccacaa cacccagcta atttttgtat ttttagtaga |
| 185161 | gatggggttt tgccatgttg gccaggctgg tcttgaactc ctgacttcgg gtgatctgcc |
| 185221 | caccttggcc tcccaaagtg ctgggattac aggcgtaagc caccatgcca ggcccaaatg |
| 185281 | ccaatatttc actccttttt atggctgagt agtattccat catgtatata taccacaatt |
| 185341 | tctttatcca ttcattgact gatggacatt tggtctggat tcatatttct gcaattgtga |
| 185401 | attctgctgc tataaacatg catgtgtaag tatccttttt gtttaatgac ttcttttcct |
| 185461 | ctgggtagat accctgtagt gggattgctg ggtcaaatgg tagttctact tttagttctt |
| 185521 | taaggaatct ccaccctgtt ttccatattg gttgtactag tttacattcc caccagcagt |
| 185581 | gtagaagtgt tcccttttca ccacatccat gccaacatct attatttttt gatgttttga |
| 185641 | ttatggccat tcttgcaggt gtaaggtggt attacattgt ggttttgatt tccattttcc |
| 185701 | tgatcattag tgatgttgag cattttttca taagtttttt ggtcgtttgt atatcttctt |
| 185761 | ttgaaaattg tctattcatg accttagccc actttttgat aggactgttt gtatttttct |
| 185821 | tgctaatttg tttgagttct ttgtagattc tggatattag tctttgtcag atgtagagat |
| 185881 | tgtgaagacc ttctccctct ctgtgggttg tctgtttact ctgctgactg ttccctttgc |
| 185941 | tgtgcagaag ctctttagtt taattaagtc ccacttattt atctttgttt ttgttgcatt |
| 186001 | tgctttgggg ttcttggtca tgaagtcttt gcctaagcca atgtctagaa ggttttttct |
| 186061 | gatgttatct tccagaattt ttatagtttc aagtcttaga tttaagtcct tgatccattt |
| 186121 | tgagttgatt tttgtataag gtgagagatg aagatccagt tttattctcc tgcatgtggc |
| 186181 | tagccaatta tcccagcaac atttgttgaa tgaatagggt gtcttttccc cacattatgt |
| 186241 | ttttgtttgc tttgtcaaag atcagttggc tgtaagtatt tggatttatt tctgggttct |
| 186301 | ctattctatt ccattggtct atgtgcctat ttttatacca gtagcctgct gttttggtga |
| 186361 | ccatagcctt atagtatagt ttgaaggaag gtaattggat gcttccagat ttgttctttt |
| 186421 | tgcttagtct tgatttggct atgtggcctc ttttttggct ccatatgaat tttagaattt |
| 186481 | tttttctagt tctatgaaga atgatggtgg tattttgatg agaattgcat tgaatttgta |
| 186541 | gattacttta ggtagtatgg tcattttcac aatagtgatt ctacccaacc acattagcat |
| 186601 | ggatgtattt ccatttgttt gtgtcatctg tgatttattt cagccatgtt ttgtagtttt |
| 186661 | ccttgtagaa gtatttcacc tccttggtta ggtataatcc caagtacttt tttttttttc |
| 186721 | ctgtggctat tgtaaaaggg gttgaatagt tgatttgatt ctcagcttgg tcactgttgg |
| 186781 | taaacagcag agctactgat ttgtgtacat taattttgta tcctgaaact ttgctgaatt |
| 186841 | catttattag ttccaggagc tttttggagg agtcttcagg gttttctggg tatatgatca |
| 186901 | catcatcagc aaacagtgac agtttcacct ctttaccaat ctggatgccc tttatttctt |
| 186961 | tctcgtgtct gattggtctg gctagtacta tgttgaatag tagtgagagt gggcatcctc |
| 187021 | gtcttgttcc agttctcaga gggaatgctt tcaactattc cctgttcagt attatgttgg |
| 187081 | ctgtatgttt gtcatagatg gcttttatta cattgaggta cgtcccttgt atgccgattt |
| 187141 | tgctgagggt tttaatcaaa atgggatgct ggtttttgtc aaatgctttt tctgtgtcta |
| 187201 | tttttttttc gggggggtgg gtgtttaaga gcagaaagtt taataggcaa aagaaagaag |
| 187261 | agaaaaccac ccccatgcag agggaggggg atcctctctt gctgcatcta ttgagatgat |
| 187321 | catgtcattt ctgttttaat tctgtttatg tgttgtgtca catttattta caagtgtatg |
| 187381 | tcaaactatc cctgcatcca tggtatgaaa ttcacttgat catagtggat tatctttttg |
| 187441 | atatggtgtt ggatttggtt agctagtatt ttgttaagga tttttgcatc tatgttcatc |
| 187501 | agggatattg gtctgtggtt ttcttttttt gttttgttct ttcctggttt tggtattagg |
| 187561 | gtgatactgg tttcatagaa tgatttaggg agtactccct ctttctcttt cttgtggaat |
| 187621 | agtgtcaata ggattgaatg tctgatagaa ttcagcbgtg aatctgtctg gtcctggact |
| 187681 | tttttttgtt ggtaattttt aaattactat ttcaatttca ttgcttgtta ttggtctgtt |
| 187741 | cagggtttct aattctgatt ctagctaaat cctcctgatt taagctagga ggattgtatc |
| 187801 | tttgcaggaa tttattcatc tcttctaggt tttctagttt atgtgcataa aggtgttcat |
| 187861 | agtagccttg agtgatcttt tgtatttctg tggtgttggc tgtaatatct cctatttcat |
| 187921 | gtctaataga gcttatttgg atcttctctc ttctttgctt cattaatctt gctaatcgtc |
| 187981 | tatcaatttt atttatcttt tcgaagaacc agctttttgt tcaatttatc ttttgtattt |
| 188041 | ttgttgttgt ttcaatttca tttagttctg ctctgatctt tgttatttct tttcttctac |
| 188101 | tatttgggtt tggtttgttt ttctagttcc ttgaggtgtt accttaggtt gtctatttgt |
| 188161 | gctctttcag actttttggt gtaggcattt aatgctatga acttttagca ccacctttga |
| 188221 | tgtatcccag cagttttgat aggttgtgtc actattattg ttcagttcaa agaatttttt |
| 188281 | catttccatc ttgatttcat tgttgaccca acaatcattc aggagcatgt actttaattt |
| 188341 | ccatgtattt gcatggattg gaggatttct tttgatttcc aattttattc cactgtggtc |
| 188401 | taagagagta cttgatacaa tttcagtttt cttaaattta ttgaaacttg ttttctggcc |
| 188461 | tgtcatatgg tttatcttgg agaaagttcc atgcactgat gaatggaatg tatactctgt |
| 188521 | ggttgttggg tagaatattc tgtaaatatc tgttgggtcc atttgttcta ggtatagttt |
| 188581 | taatccattg tttctttgtt gactttctgt cttgatgacc tgtctagtgc tgtcagtgga |
| 188641 | gtattgaagt cccccactat tattgtgttg ctgtctatct catttctgag gtctagtagt |
| 188701 | aattgtttta taaatttggg agctccagtg ttaggtgcat atttatttag gattatgttt |
| 188761 | tcctgttgaa caaagccttt tatcatgatt tagtgtccct ctttgtattt tttaactgct |
| 188821 | gttgctttaa agtttgtttt gtctgatata agaatagcta ctcctggtca cttttggtgt |
| 188881 | ccatttgcat ggaatgtaat tttccaccct tttacctcaa ctttatgtga gtccttatgt |
| 188941 | gttagttgag tctcttgaag acagcagata cttagttggt gaatactttt tttttaaatt |
| 189001 | atactttaca ttctggggta catgtgtgga atgtgcaggt ttgttacata ggtatacaca |
| 189061 | tgccatggtg gtttgctgca cctgtcaacc cgtcatccac attgggtatt tctcctaatg |
| 189121 | ctgtccctcc cttagctccg catccccaaa caggccacag tgtgtgtaca tgtgttctca |
| 189181 | ttgttcaact cccacttatg agtgagaaca tgtggtgttt agttttctgt tcttgtgtta |
| 189241 | gtttgctgag aatgatggtt ttcagcttca tccgtgtccc tgcaaaagac attaactcat |
| 189301 | ccttttttat ggctgcatag tattccatgg tgtatatgtg ccacattttc tttatctagt |
| 189361 | ctatcattga tgggcatttg ggttggttcc aagtctttgc tattatgaat agtgctgcag |
| 189421 | taaacatacg tgtgcatgtg tctttacagt aaaatgattt ataatccttt gggtatatac |
| 189481 | ccagtaatgg gatggctggg tcaaatggta tttctagttt cagatccttg aggaattgcc |
| 189541 | acactgtctt ccacaatggt tgaactgctt tagactccca ccaacagtgt aaaagcattc |
| 189601 | ctatttctcc acatcctctc cagcacctgt tgtttcctga ctttttaatg atcaccattc |
| 189661 | taactggcgt gagatggtat ctcattgtgg ttttgatttg catttctcta ataaccagtg |
| 189721 | atgatgagcc tttttttcat atgttggttg gctgaataaa tgtcttcttt tgagaaatgt |
| 189781 | ctgttcatgt cctttgccca ctttttgatg gggttgtttg atatttcttg taaatttgtt |
| 189841 | taagttcttt gtagattctg gatattagcc ctttgtcaga tggatagatt gcaaatattt |
| 189901 | tctcccattc tgtagattgc ctgtccaatc tgataatagt ttcttttcct gtgcagaagc |
| 189961 | tcttcagtgt aattagatcc catttgtaaa ttttggcttt tgttgccatt gcttttggtg |
| 190021 | ttttagtcat gaagtctttg cccatgccta tgtcctgaat ggtattgcct aggttttctt |
| 190081 | ctagggtttt tacggtttta ggttttaggt ttaagtcttt aatacatctt gagttaattt |
| 190141 | ttgtataagg tgtaaggaag gaatccagtt tcagctttct gcatatggct agccagtttt |
| 190201 | cccaacacca tttattgaat agggaatcct ttccccattg tttgtttttg tcaggtttgt |
| 190261 | caaagatcag atggttgtag atgtatggcg ttatttctga ggcctctgtt ctgttccatt |
| 190321 | ggcctatata tctgttttgg taccagtacc atgcbgtttt tgctactgta gccttgtagt |
| 190381 | ataagtttga atcaggtagt gtgatgcctc cagctttgtt ctttatgctt aggattgtct |
| 190441 | tggctatgca ggatattttt tggttccata tgaaatgtaa agtagttttt ttcaagtctg |
| 190501 | tgaagaaagt caatggtagt ttgatgggga tagcattgaa cctacaaatt actttgggca |
| 190561 | gtatagccat tttcacgata ttgattcttc ctatccatga acatggaatg tttttccatg |
| 190621 | tttgtgtcct ctcttatttc cttgagcagt ggtttgtagt tctccttgaa gaggtccttc |
| 190681 | acatcccttg taagttagat tcctaggtat tttattcact ttgtagcaat tgtgaatggg |
| 190741 | agttcactca tgatttggct ctctgtttat ctgtttttga tgtataggaa tacttgtgat |
| 190801 | ttttgtacat tgattttgta tcctgagact ttgttgaagt tgctaatcag cttaaggaga |
| 190861 | ttttgggctg agacaatggg gttttctaaa tatataatca tgtcatctgc aaacagagac |
| 190921 | aatgtgactt cctcttttcc taactgaata ccctttattc ctttctcttg cctgattgcc |
| 190981 | ctggccagaa cttccaatac tatgttgaat aggagtggtg agagaagaca tccttgtctt |
| 191041 | atgcbggttt tcaaagggaa tgcttatgct tccagttttt gcccattcag tatgatattg |
| 191101 | gctgtggatt tgtcataaat agctcttatt attttgagat acattccttc aatacctagt |
| 191161 | ttattgagag tttttagcat gaagggctgt tgaattttgt tgaaggcctt ttctgcatct |
| 191221 | attgagataa tcatgtggtt tttgtgattg gttctgttta tgtgatggat tacatttatt |
| 191281 | gattcgcata tgttgaacca gccttgcatc cccaggatga agccagcttg atcatgttgg |
| 191341 | ataagctttt tgatatgcta ctggattcag tttgccagta ttttattgaa gatctttgca |
| 191401 | ttgatgttca tcagggatat tggcctgaaa ttttcttttt ttgttgtgtc tctgccaggt |
| 191461 | tttgctatta ggatgatgct ggcctcataa aataagttaa ggaggattcc ctctttttat |
| 191521 | attgtttgga atagtttcag aaggaatgat accagatcct tttagtactt ctggtggaat |
| 191581 | tcatctgtga atttgtctgg tcctggactt tttggttggt aggctattaa ttgctgcctc |
| 191641 | aatttcagaa cttgttattg gtctagtcag ggattcaact tcttcctggt tcagttttag |
| 191701 | gagggtgtat gtggctagaa acttatccat ttcttctaga ttttctagtt tatttgcata |
| 191761 | gaggtattta tagtattctc tgatggtagt ttgtatttct gtgggatcgg cggtgatata |
| 191821 | ccctttatca ttttttattg catctacttg atttttctct cttttcttct ttattagtct |
| 191881 | ggctagttgt tgatctttca aaaaagccag ctcctggatt cattgatttt tttttttttt |
| 191941 | gaagggcttt ttgtatctct gtctccttca gttctgctct gctcttagtt acttcttgcc |
| 192001 | ttctgttagc ttttaaattt ttttgctctt gcttctctag ttcttttaat tgtgatttta |
| 192061 | gggtgtcgat tttagatctt tctttctttc tcttgtgggc ttttagtgct ataaatttcc |
| 192121 | ctcaacatac tgctttcaat gtgtcccaga gattctggta cattgtttct ttgttctcat |
| 192181 | tggcttcaaa gaacatcttt atttgtgcct taatttcatt atttacccag tagtcattta |
| 192241 | ggaacaggtt gttcagtttc gatgtagttg tgaagttttg agtgagtttc ttaatcctga |
| 192301 | gttctaattt gattgcactg tggtctgaga gactgttatg atttccattc ttttgcattt |
| 192361 | gctgaggagt gttttacttc caattacgtg gtcaatttta gaataagtgc gatgtggtgc |
| 192421 | tgagaagagt gtatattctg tttatttcgg gtggagagtt ctttagatat ccattaggtc |
| 192481 | tgcttggccc agagctaagt ttaagtcctg gatatccttg ttaattttct gtctcgttga |
| 192541 | tctgtctaat attgacagtg gggtgttaaa gtctcatgct attattgtgt gagggtctaa |
| 192601 | gcctctttgt aggtctctaa ggacttgctt tatgaatctg ggtgctcctg tattgggtgc |
| 192661 | atatatattt aggatagtta gctcttcttg ttgcattgat ccctttacca ttatgtaatg |
| 192721 | ctcttctttg tctttttttg atgtttgttg gtttaaagtc tgttttgtcg gagactagga |
| 192781 | ttggaacctc tgcttttttt tgcbgtccat ttgcttggta aatattcctc catcccttta |
| 192841 | ttttgagcct atgtgtgtct ttgcacgtca gatgggtctc ctgaatacag cacaccaatg |
| 192901 | ggtcttgact cttaatccaa tttgccagtc tgtgtctttt aattggggca tttggcccat |
| 192961 | ttacatttaa ggttaatatt gttatgtgtg atttgatcct gccattatga tgctggatgg |
| 193021 | ttattttgct cattagttga tgcgatttct tcatagcgtt gatggtcttt acaatttagt |
| 193081 | atgtttttgc agcggcbggt actagttgtt cctttccatg tttagtgctt ccttcatgag |
| 193141 | ctcttgtaag gcaggcctgg tggtgacaaa atctctcagc atttccttgt ctgtaaagga |
| 193201 | ttttatttct ccttcactta tgaagcttag tttggctgga tatgaaattc tgggttgaaa |
| 193261 | attattttct ttaagaatgt tgaatattgg cactgtcttc tggcttgtag ggtttctgca |
| 193321 | gagagatcta ctgttagtct gatgggcttc cctttgtggg taacccaacc tttctctctg |
| 193381 | gctgccctta atattttttc tttcatttca accttggtaa atctgatgat tacatgtatt |
| 193441 | ggggttgctc ttcttgagca gtatctttgt ggtgttctct gtatttcctg aatttgaatg |
| 193501 | ttggcttgcc ttgctagctt ggggaagttc tcctggataa tatcctgaag aatgttttcc |
| 193561 | aacttggttc cattctcccc atcactttca ggtacaccaa tcaaacatag atttggtctt |
| 193621 | ttcacatgat cccatatttc ctggaggttt tgttcatttc ttttcactgt tttttatcta |
| 193681 | atcttgtctt cttgctttat atcattgaat tgatctccaa tctctgatag cctttcttct |
| 193741 | gcttgatcga ttcggctatt catactcgtg tatgtttcat gaagttctcg tgctgtgttt |
| 193801 | ttcagctcca tcaggtcatt tatgtcctct aaactggtta tttcagttag caatttgtct |
| 193861 | aacctttttt caaggttctt agcttctttt cattgggtta gaacatggtc ctttagctcg |
| 193921 | gaggagtttg ttattaccca ccttctaaag cctacttctg tcaattcgtc aaactcattc |
| 193981 | tccatccagt tttgttcgct tgctggcaag gagttgtgat cctttggagg agaagaggca |
| 194041 | ttctggtttt tggaatgttc agccttttcg cactggtttc tccccatctt cgtggattta |
| 194101 | tctacctttg gtctttgaag ttggtgacct tcggcbgggg tctctgagtg gtcctttttg |
| 194161 | ttgatgttga tactattcct ttctgtttgt tagttttcct tctaaccatc aggcccctct |
| 194221 | gctgcaggtc tgctggagtt tgctggaggt ccactccaga ccctgttcac ttgggtatca |
| 194281 | ccggcagagg ctgcagaaca gcaaagattg ctacctgttc cttcctctga aagctttgtc |
| 194341 | ccagagggac atccaccaga taccagccag agctctcctg tatgaggtgt ctgtcagccc |
| 194401 | ctactgggag gtgtttccca gtcagtatac ctgggggtga gggactcact tgaggagtca |
| 194461 | ctgtgtccct tatcagagct ggaacccagt gttgggaaat ctgctgctct cttcagagct |
| 194521 | gccacacagg gcbgtttaag tctgctgagg ttgcacccac aaactcccct tcccccaggt |
| 194581 | gctctgtccc aggaaggtgg gggttttacc tatgagtccc tgactggggc tgctggcttt |
| 194641 | ttttcagaga tgccctggcc acagaggagg gaatctagag aggcagtttg ggtgcagtgt |
| 194701 | ccttactgag ctgtggtgag cttcgtccag tttgaacttc ctggcaactt tgtgtacact |
| 194761 | gtgagggtaa aaccccctac tcaagcctca gcaatggcag acgtccctcc ccccaccaag |
| 194821 | ctcgagcatg ccagatcgag ctcagattgc tgtgctggca gcgagaattt caagccagtg |
| 194881 | gatcttagct tgctgggctc cgtgggagtg ggacccactg agccagacca cttggctccc |
| 194941 | tggcttcagc cccctttcca ggggcgtgaa tggttctgtc tcactgacat tccaggcacc |
| 195001 | actggggtat gaaaaaacaa ctcctgcggc tagctctgtg tctgcccaaa cggcagccca |
| 195061 | gttttgtgtt ggaaacccag caccagggcc ctggtggcgt gggaactgga gggaatctcc |
| 195121 | tggtctgcag gttgtgaaga ccatgggaaa agtgcagtat ctgggccggt gtatgtggta |
| 195181 | cagtccatag tggcttccct tggctaggag agggagttcc ctgatccctt gcacttcctg |
| 195241 | ggtgaggcaa cgccccaccc tactttggct tgccctcctt gggctgcatc cactgtccaa |
| 195301 | ccagtcccaa tgaaatgaac tgggtacctc agttggaaat gcagaaatca cccaccttct |
| 195361 | gcatcgatct tgctgagagc tgcagactgg agcbgttctt gttttgccat cttgccagca |
| 195421 | aatcggtgaa ttgttatgta ttctgcaatt ctatatcttt taagtggagc atttaggcca |
| 195481 | tctgcattca atgttagtat tgagatgtga ggtactattc tattcatcat actatctgtt |
| 195541 | gcctgaatac cttggttttt tatttattta cttatttatt gtatttttgt tttaatgggt |
| 195601 | cttgtgagac tcatgattta gagattctgt tttgatgtgt ttccatggtt cgtttcaata |
| 195661 | tttagagctc ctttcagcag ttcttatagt gctggcttgg tagtggcaaa ttctcttggc |
| 195721 | ctttgtctga aaaagactgt atctttcctt catttatgaa gcttaggata caaaactgtt |
| 195781 | ggctgataat tgttttgttt aaggaggata aaaataggac cccagtcccc tctagcctgt |
| 195841 | agggtttctg ctgagaaatc tgctgttact ctgatagatt ttcctttata ggctacctgg |
| 195901 | tgcttttgcc tcacagctct taagattttt ccctctgtct tgactttaga taacctgata |
| 195961 | actataggtt taggcaatga tctttttgca atgaatttcc caggtgttcg ttgaacttct |
| 196021 | tgtatttgga tgtctacatc tccagcaagg ctgaggaagt tttcctctat tattccccca |
| 196081 | aatatgtttt ccaaacttag atttctcttc ttccttaggg actccactta ttcttaggtt |
| 196141 | tggtcattta acataatccc aaacttcttg gaggctttat tcatttttta aaattctttt |
| 196201 | actttccagt acattttgca tttctctgtg ttctttactt cctgaagtag tgattgtttt |
| 196261 | atatttatgc tatctatttc actgaagatt tctcccctca tatcttgtat catatttttt |
| 196321 | tatttcctta agttggactt cacctttttc tggtgcctcc ttgattagct tactactcga |
| 196381 | ccttctgaat ttttttttct ggcaattcag ggatttcata ttggtttgga tccattgctg |
| 196441 | gtgagctatt gtgatttttt gatgatgtta aagaacatta ttttgtcata ttaccagaac |
| 196501 | tgtgtttctg gctccttctt atttgggtag gctatttcag aggaaagatc tgaagctcaa |
| 196561 | ggctgctgtt cagattcttt tgtcccatgg ggtgttccct tgatgtagta ctctccccct |
| 196621 | tttcttagga atgtggcttc ctgagagcca aactgtagtg attgttattt gtcttttgga |
| 196681 | tctagccacc cagtggagct actggtctct gggctggcac tgggggatgt ctgcacagag |
| 196741 | tcctgtgatg tgaaccatct ttaggtctct cagctgtgga taccagcatc tggtccagtg |
| 196801 | gaggtggcag aggagtaaaa cagactctgt gaggtgcctt agttgtagtt gtttaatgca |
| 196861 | ctagttttgt gctagttggc ctcctgccag gaggtggcgc tttcaagagt acgtcagctg |
| 196921 | tggtagtata ggggaggatc aggtggtggg tgggggccct agaactccca agaaaatatg |
| 196981 | aactttgtct ttagctacca gggtgggtag ggaaggacca tcaggtggga gcagggttag |
| 197041 | gtacgaatga cctcagactc tccttgtgtg gggcttgctg tggctgctgt ggggataggg |
| 197101 | gtgtggttct caggtcaatg gagttatgtt cccaggagga ttatggctgc ctctgctgtg |
| 197161 | tcatgcaggt tgtcaggaaa gtggagaaag ctgatagcct cacccagctc ccatgcaacc |
| 197221 | caaaaggctg gtctcattcc cactgtgccc cctccaacag cactgagatt gttttcaggc |
| 197281 | agtgggcaag tagggctgag aacttgcccc aggttaccag cctcctggtt gagaaagcaa |
| 197341 | gcggggcttt tgtgccacct ccctgcctgt caccggattc acatcctccc ccaagttctg |
| 197401 | gccaggaaac ttcacatttg gttggaatcg ttacagagtt cagctggagg tttccttctc |
| 197461 | cctgtggtct tttcccagtt cctctggcag ccctcctcaa ggactcctgt gagacaagtc |
| 197521 | agaaattgct tctctgggga cccggagaac ccacatggct tttcctgtgg cttcttctac |
| 197581 | ccttgtgttt cactcagctc tctaaattgt ctcagctcca ggtaaggtca aatctttctc |
| 197641 | ttgtgatctg gacctttagg ttccccagtg agtgtgtata ttcggggcag gggatgatct |
| 197701 | ccctttccca cttttgcagt ttgggcactc acagtatttg ggctgtctcc caagtcctgc |
| 197761 | aggagcaacc tgtttccttc aaatggtctg tggattctct tgactttccc agtatatttc |
| 197821 | tgcagcagtt cttggaacaa aagttcacaa tgcaagtctc cacattctat tctatccatc |
| 197881 | caagtggggg ctgcaattta gtcctgactc ctatctgcca ttttttccta gcagttcatt |
| 197941 | ctggattatt tttaaccaat aactcaacca aagcacaggc cttcagttct tgtactttac |
| 198001 | aggtatcttg agtatagcaa tttttcatct gcagaatgga gagtatatag gcaattaatg |
| 198061 | catctagatt ttgtccatca aaaggtaaca ttgacatccc atttttctgc tattttataa |
| 198121 | gttcatacca ggtgtcaagc attatgctgt gggcaagttt cttagtctct acatccttga |
| 198181 | gtctccttac tatgaatgga gataaaagta ctactgcata aagttattga gataattaaa |
| 198241 | taagctcata gatacaagca tgtaacatgg tacctagcat aataattttc tttatccctc |
| 198301 | ttaaccctcc ttcaaggtag gttttactat tttgacttta catataagga aactgaaact |
| 198361 | ctgagaggat aaataattgt cagacaatta ataagtgata gatccacaat ttaagcttgt |
| 198421 | tgtgtggaaa cttaccttgg tatgatggag gtctctaagt acactaccaa gcaagctctc |
| 198481 | ccagaagtca caaacctgaa gttcacatac caaattaaaa tgctcaaatc acatggctta |
| 198541 | gtaagcttat ttaaagcaca gtgagaagta aggggaaaga gatgggttat ggtaagacat |
| 198601 | gggataaagt agcaatatcg tgagatcatg ggcaacagga ccacacttct gtatcctgtg |
| 198661 | ttctgcagtg ttcgtgtgcc ctgtctctct catcctgctg atagtgtggc taaggggact |
| 198721 | gaggtcccaa tgggggccac ataataaaga ttacttgggc caatgatagg tacaagctcc |
| 198781 | attggaatga atgacacagg acaagtacgc ctgatcatag cagtagcttg tgattagcct |
| 198841 | gctgaaattg caggagttgt gtctgcattt cttggacaga gcagatgcaa gaggaacaaa |
| 198901 | ctggatgaca ccaatggctg gtcaagttag cagtgacagg tatctcagtc ccaaagtgtc |
| 198961 | aggataatga tttggtcttt tcatctcttt ctaactgtaa tgttcttgtt tgttcatcat |
| 199021 | atatattttt aaaaatttat tttctgtctt tctttggcag atattacagg ttactaattt |
| 199081 | acctgctatc tgtagtgaac acatcaaaca tgcctatgca tcatatgtac atgtttactt |
| 199141 | attagctata tttaacatat cctatgtgca ggaccagcta cataatttgc atgatgtaat |
| 199201 | gtaaaatgca aatggggggc cccttgttaa aaaatactta agaatttcta ttattaagaa |
| 199261 | ttttaagatg atgaaagaaa ccagaatatg ccagctctaa atatgcctca ttgacgtaaa |
| 199321 | tatttttgag ctgaagggaa ttaagaagca catgcagaaa agctctctgc ctcttctatt |
| 199381 | tgcctaaaag caggacagag aattacaaaa acaaaaggtc ttttatgttc ctcctcccct |
| 199441 | ttcctgccta aagacaagat gtaaattctc ctttacaacc tttaccagct gagagcctgc |
| 199501 | ttcagaaaaa tctgggaaca gacttgactc tttcccacag ttctctggcc tttggaagct |
| 199561 | tagggcbgtt ttcctctttg tcctgtcact tctctacaat gtattgatct tgttgaatac |
| 199621 | tttgtattag ctgggattct aagccacact gccttgagtt acttttcacc tgcgtgatgt |
| 199681 | tcatgtatta atagacttgt ttgtttttct cttgttaatc tgtcatttgt tacaggagac |
| 199741 | tgtctcaatt aaaaacttac gagggttcag aaaaattata atttcttccc aacaatgaca |
| 199801 | atagcagagc ataaaactaa gcacagggcc catgtgagta tggggtcctg taacagtgca |
| 199861 | ggtcacaggc ctatgaaatt gcccctgcct atgaatttca cctgactatt ccaagccaag |
| 199921 | agctacttat tatctatgct gaacatttct aatgatttcc atcttttcca atagcagaat |
| 199981 | tcagtggtct caaataattc agccaactca cattatagaa ctcaagtcta tgtaactcca |
| 200041 | agtcactgtt catgcactat agtcatggag ttctttttaa atacctgtca tccccatgtt |
| 200101 | caaacccttc aatgtctccc tagtaattaa caaaatttag tcaattttgc ctaaaaaata |
| 200161 | tcggtgagct ccacaacctg aattccaact tactttccaa agcaaactct cattaattac |
| 200221 | tgatgatgac catgaggttt tggagaggga caaaaccatc tccaaatgtt tttgagtgtc |
| 200281 | tcctgtgtat cgtgtcctgt actagatgtt ttacacatca actcatttaa tccttatgag |
| 200341 | aacattgaaa acaaagttat ccccatttta cagatgagaa aattgagatt gatagaggta |
| 200401 | aggtcacctt acacagttat taactgtgag ggtggattaa aatccagatt tctctgtctc |
| 200461 | taaaacctca ggctttttct actgtgccat actacttcta atttgaactg tattttccag |
| 200521 | tgaaatgaga ttaatcttcc ctatagacat gccaggtacc tgttatcact ttattctggt |
| 200581 | atccgctcca ttttttggca tcctatgctt cttccatgcc tgactttatc tcccgtttga |
| 200641 | gcctctttct ctgccaacgc ccatagaaat aaaattcaaa tgaattctct tgattattca |
| 200701 | tttggctctt ctgttaggca gcattgtgtt gcatttttaa aaattatatg taaatctcca |
| 200761 | tttcagaaga gattttgagc tcctcagggc acgaaacgta tcacatagct ctttattgtc |
| 200821 | tcaagtacta gcatagtgct ttgtatgcaa tatttaatta atattttctg tgtgggtgaa |
| 200881 | aatgttaatg tcttttttgt tggacattca tttccaaagc agaacaatta acatgactgg |
| 200941 | atgtttaaag ggtctggatg aataggtgag tgaaggacag aaatgtgctg gtaaaaagcc |
| 201001 | ctgatctata gtgcttgcca atttccgtgg tgtaaatact tccactatag ccaattttaa |
| 201061 | gctaccaaca gttagagcca actcacaaaa ttcttgaaaa tttcataatc agtggttttg |
| 201121 | tgtgagccag cataagtcag cttcggtatc tctttgaggg atttaataat gaactcaact |
| 201181 | aaggtaaaac tgatctggaa caactgaaag cagaggttaa agtaaaataa ctctgttatt |
| 201241 | taatctataa tcaactatga aatgcttgaa ttagagctgc ctgtgagaag gaaaaacaat |
| 201301 | gattccataa tgtgaaggct ccagacaaag gccaaaagtg catcaatgac ttcttatccc |
| 201361 | agttttttaa actaaaaaaa ctgctagcta aatgattttt gttttatatg acttttgttt |
| 201421 | tatatgactt ttgtttatat gactttcctc ccaaatctgt tagcatgcat agagtttcag |
| 201481 | tttttctttc atcttctcct cttctgctca tttctctctt tttaaatttt atcataaagt |
| 201541 | ggaacacttt ttattcaaga gaaatcaatt cttgattgag atcagaaatc tcttgccatt |
| 201601 | cacattagag ttgatctacc acaattgcct gcttcatcat tttcattcta ttggaataag |
| 201661 | tatttacagc tataaactat cctgcatctt acatatttct attaaacaag aacaatgtcc |
| 201721 | gtgacagttt tctgtctcag gatttatctt attaatattt attgtattgt tatgagtgct |
| 201781 | tagcaaatta ttgtggttaa ctttaccaat gcctttcaaa taatattttg aaattttccc |
| 201841 | tgaaaggata ttgagaaaag ccaaatgtaa aaattattgt tttttttcct tgggatttgc |
| 201901 | atgttttgaa aacgttctca attgttaggg aagtcagctg taaaacacag gctaaatata |
| 201961 | cttttgtcta ccaagaattc cctttacttg tctgtttcgt gatttgttta atctttctta |
| 202021 | gttatgcatg taccatttta ccatagttac ctggagatat tcttgtctct gccttagttt |
| 202081 | ggcaggcttt tcaagtggct cactgagcta ctgtttctat ttcttttaga aagttgtgga |
| 202141 | ggcatttatt actctcataa ctgcctcaaa atctcaagca catggcctag ttaaatcatc |
| 202201 | ttgaggttct gcccatatgg ttgcagaagg atattagtca ttggaaaaaa tgggtctaaa |
| 202261 | atgataatat tcaaagatgt tttccaatat tcttggcaat cttattcact aatttccacg |
| 202321 | gacatttaat tagcaagaat ttaaagaacc ttgttttagt ttcctgctgc tgtaatagaa |
| 202381 | tatcacagac tggataatat ataaagaaag gaaatttatt gggcttatgg ttctggaggc |
| 202441 | tgggaagtcc aagaggcatg acactggcac ctggcaaggg tcatccaatg gtggaaggca |
| 202501 | tcacatggtg agcaaggacg agagacaggg agaaatgggg ctgtatttat ctttttatca |
| 202561 | ggagcctact ctgtgatact agcccactct catggtaacc acattaatac attcatgagg |
| 202621 | atagagccct catggccgaa ttatctctta aaggtcccat ctcttactac tgttacaatg |
| 202681 | gcaattaagt ttccaataca taaactttag gagacatagt caaaccatag aaatcttaaa |
| 202741 | cttcaaataa acagggattt tttttagtag cacagtataa aatgataata ataaatatca |
| 202801 | gatataaaaa atttctgaag ttctttttag atagataaat catggttact attatcttct |
| 202861 | tagttacatt tcattgcacc ctattttctg tggtattatc agtcaacata ttatatatag |
| 202921 | taagacacat taaattttct gagcttgcca gggcatcctg tcccctaaca gtttttgata |
| 202981 | atgatttatc aaatgtgtac tctttagaat tttagcbgtc agtaacagtt gattttcaca |
| 203041 | acttttatta gactatccat gatgtttttt ggaaaggtag ttaaaaggat aaatacatta |
| 203101 | attatcataa aattatctag gaatgctttt aaatacattt gacataatac attaacacta |
| 203161 | aaaggaaagc aaatatgcac ctaataagca caaaataaga ttaatcagag aaatgtgtcc |
| 203221 | ttgctgtttt ggggaagagt tatccagatc tcaggtaagg tactttttgt ggagataacc |
| 203281 | ttctgtttta tgaagcttgt aacaagataa caatcaaggc atttttgtgg ccatgtttat |
| 203341 | gtatatgagc aagcaatggc aagtgagata ctagtttggg ggcttaaata agataaaagt |
| 203401 | agttaaactt tattaaaatg cacatattaa aataaatttt gaaatacatt gtattcaaat |
| 203461 | attgtattag ggttctctta gacaactcat aggatacccc cacacacaca ttttatgtgt |
| 203521 | gtatgtatat atatatatat atatatatat atatatatat atatatatgt atatacacac |
| 203581 | acacatgcgt acatatatat acaggagttt attaagtatt aacttacatg atcacaaggt |
| 203641 | tccacaacgg ctgtctgcaa gctgaggagc aaggagagcc agtcccaaaa tcaaaactga |
| 203701 | agaacttgga gtccgatatt cgagggcatg aagcatccag cacaggagaa agatgttgtc |
| 203761 | ggggaggcta ggccagtctc tcattttcag atttttctgc ttggtttata gtcactggca |
| 203821 | gctgattaga ttgtgcccac cagattaagg gtgcatctgc cttccccagc ccactgactc |
| 203881 | aaatgttaat ctctctctct ttttttttga gacggagtct ggctctgtcg cccaggctgg |
| 203941 | agtgcagtgg cacgatctcg gctaactgca agctctgcct cccgggttca agccattctc |
| 204001 | ctgcctcagc ctcccgagta cctgggacta caggtggccg ccaccatgcc cggctaattt |
| 204061 | tttgtatttt tagtagagac agggtttcac tgtgttagcc aggatggtct cgatctcctg |
| 204121 | acctcgtgat ccacccgcct cagcctccca aagtgctggg attacaggcg tgagccacca |
| 204181 | cgcccggcct caaatgttaa tctcttttgg cagtacccac acagacatgc ctaggattaa |
| 204241 | ttctttgtac ccctcaatcc aatcaagttg acactcagta ttaaccatca caaatatcat |
| 204301 | aacaaatcgt gtgaaaggag gaaaggggaa tagttttaca tttcaaatat aaggggtcca |
| 204361 | agattccctt ttatagttat aaaaattaga aatttttaaa tggtatgaat cacttatttc |
| 204421 | aaatagttgt atttatgatg cttttgtaat atatatgcat aagtttacct atatatttat |
| 204481 | atatgtgtgc atgtacatat aatgtataaa tacacaaagg cactcatatc tacataatga |
| 204541 | tacatgattc tttggatgaa ttaactttta cattttatgc atacactctt attgtgtttc |
| 204601 | ttgaccagtg cttggtcaca gggatcagga caagttagaa gggaggctat gggaggacac |
| 204661 | tgtaaaatat taacacaact taattctgca gaaaggccag ttcacatagg aagatggtgt |
| 204721 | cctctgaggg tgcacttacc caagctgtgt tccccaattg cttaggacag tcttccatgt |
| 204781 | ctaagtttgt catgtggcaa acaatcaaat ttacctggta gtcctagtga tttgcagagc |
| 204841 | tcactgaaat gccatcgttt aaaagcatca ttttaaattt attgtccact gatagatcaa |
| 204901 | aagatagaat accctattcc aagagaaaaa ctaaagactt ctattagaaa aatttaggtt |
| 204961 | tagcacttct aaatatcact atacaacatt ttgaaaaatg ttttgaaaaa acagttataa |
| 205021 | tgcttagaaa catttagaag aatataagca cacaggtatt gtgttgaaac acattaccta |
| 205081 | cactttcaat gcaggatgct tcttctcact atggggcagc actttgtgaa tttttctgtt |
| 205141 | tcacagtatt cagaattcat tagaacatgt ttgattagaa tgcacatgag gcaagcaaaa |
| 205201 | ttagcacagt ctgtctatca agccacgtag atggccttgc aaagagctga atgctagtat |
| 205261 | atctaagaat atgagattat atgtatgatt catggtggaa atgtctcctt tgttagataa |
| 205321 | attcctgcaa accaatgcct ggaatgccct ctctgcctac tcgaattcta ttagctcttt |
| 205381 | aacatccatt tgaattctta tctcatctac aatatcttca gcaactctga agcctccatt |
| 205441 | gtcctctccc ttttcacttc aaggcbgtct tgcattgtta tgtaactatt tcatgggcct |
| 205501 | agatctcatt tttcttaata aagtttaagc tgtagaaagg aattcatata tttccttgat |
| 205561 | ttcttttaaa cacttaacac attaagaaca taaaacatac ccagtaatta cttaaagaaa |
| 205621 | aaaaagacta agtaaaaggg acaatgaaag aataatagaa ataaaatgaa tttgtttatc |
| 205681 | agccagaatt ttgggtgggt cctcctcata gctatgtata gcaatctata atttcagtgc |
| 205741 | tatttctacc tacttctaat aaaaatattc ccacagtaaa ggggcaaggg gaaattccac |
| 205801 | cattttgcaa cattttggtg attagaattg ttgagatatg gttttagaca gagtttcctt |
| 205861 | cttattcttg ggctggtgat tttaagattc atttgtgtgt tttaggtcac attctcccca |
| 205921 | aatctcattt ttgctcaaca caagaacagt aagagtaagc tgggatgcct tagtgatatg |
| 205981 | gcctggaact ctgcagccta cataatacta tccctacctt caggtattag tgttgctaat |
| 206041 | aacatgctca actgattcat taaaacaaag gacaaaaaaa taaacaaaca taaaatcatt |
| 206101 | ttcatagagc ttaaagagac tatccagaga gacatttata aagttaccat tataaaatgc |
| 206161 | ttcacactaa aaaagaattc tttacaataa tttggttgta aattgtgtaa aattcttttt |
| 206221 | ccctccatca attttagatt tattggttgg agccttgtaa gtcagactga caaaagacag |
| 206281 | attaacaaga gaaaaacaag cagaagttta ttaccatgta tatccctctt attcatggga |
| 206341 | gatgagtaac tgaaagagga ggttagaact tgagctcaca tagcatctta acaaaagaac |
| 206401 | agtacatttt taaagaagtg acaagacaaa ggaaaaggac tttgagtttc taggatggca |
| 206461 | aatgatggga aagcaaatat atgggggaac taatggaaaa taaggactat ttagtaaagc |
| 206521 | ttgtcatgca gattcctctg gtgccctctc ttgactgata agtctggaat agtcttcagt |
| 206581 | gattaacttc tgtccttcca ggtaagaggg gaatgaaaat aataccttta tatatttatc |
| 206641 | tcctgctttt aggcaaaggg ggagagcaga gagcttttct tgtatctgct gcttcttgat |
| 206701 | tgctttcatc ttgaaataat ctttatacca tatttttggc acattttggc ataatatggc |
| 206761 | acataatcct gacatggcat attttggggt gccatattct gctaccctcc aaattgtctc |
| 206821 | tacccttcta ttatcttagc agataatagt acaacctccc aaattttggt ttccttctgt |
| 206881 | gaggaaaaca cagtttgtgc tgtgaccagt attgtagctc ctggggaaac ctgtgtggtc |
| 206941 | tcctctctct tctccctgct actgtaatac taacaaaaag aatgtttaaa ccataaattg |
| 207001 | aatcttaaag caatcaagta caaatcagag ttaggaaaag ttttaatcag caggtagaaa |
| 207061 | aaggatctag tgtgctttta tttttaaatt tttcattaat ccactaaagc ccagcttgtt |
| 207121 | atttttacct tgtttcatct aaaattaccc taagatgctg gcatgacctc tagggtgtga |
| 207181 | ctaaaatgtg tttgagtctt tatttgacat ttaagccagc catgaaaatt agcattggtt |
| 207241 | tagagctcca gggagcaaag aagtcatcct gagtctgaag aatttctgtg gctgtaactt |
| 207301 | ggaatttcat acaaatttga cctgtccaag acttgcttta attattcact aacaccagca |
| 207361 | tctggcttta acacatcttc atgagtatca tcagaactag agaaaaaaaa ttcccttaag |
| 207421 | aaatttttgt acataggtca ctctcatgtt tgttgctaat aaaaatttta gaggtcttag |
| 207481 | taatctaaaa aatatatatt ttacctgtaa agtggtacta tccaaaagga actataccaa |
| 207541 | aatacgtcag acataaaagt taagaggtta tgaaaatgta catgcaattc tctttttgct |
| 207601 | tgttcttagt ttatttactg cttgttttca gatagtcagg tagttactct ttagagatgt |
| 207661 | aaaataaagt atggacatga aaagtagtta tttaccaaag gcaattatca agtatcaaaa |
| 207721 | catgcagagt acttactgcc agttcaggga gacaacaaaa caattatata taatatagta |
| 207781 | gctttttagc ccaatcttcc aataattgct aggccaacat gctaaattta agagttcttt |
| 207841 | acctcttaaa tttagtagtc tcagtaaata aaatttgttt agttctgcag gggcagaaag |
| 207901 | atgtgatact ttgtccctat cataaggtca aggacaacac ttctctaatg aaagagggtt |
| 207961 | cacaagagaa aaacataaca catttcttta accaaagttt tatatgacat ggaagccttc |
| 208021 | agaatgaaga tttgaagacc caaggaaaaa ctgtccattt ttatgcttag attcaataaa |
| 208081 | gtgtgaacag ccatgtagaa gtgttattag acaaacaggg aattatctaa tagtaatgaa |
| 208141 | ctgagtgggg aaacccagca atacctgtcc agattcttct tggcctcact gttgtaacat |
| 208201 | ctcttcaccc tcctggctta tttggtatag ttccttttag acagtactac ttcatagata |
| 208261 | aaatatatat attttgatta caaagactac aatttttgtc agcaacaaac atgagagtgt |
| 208321 | ttcttcctcc cttgacctac tgttgaccaa gactaggtca tagaatttct ttatggccac |
| 208381 | cttctagaca gaaaggtaga gaaggttaga gtaataattc ttgtttttat ggccggcttt |
| 208441 | ggggaaaagg gggttttagt ttctacggcc tgccctgggg aaggggaatt ctgaattcta |
| 208501 | tggcbggttt tggggaagaa caaggggtga gaggtaggag agcaggagaa ggtcagagag |
| 208561 | accttggctc tgatgctgct actgaggcct tccagtgtcc tttagttcaa ggtgctcggc |
| 208621 | atgccaaagc agcacattca ggatatcatt ttctgagccc aacagttcca tattctgccc |
| 208681 | ccaacttgtt gcacattgga attgttcatg gacttacaaa aatattgatg ccatatccca |
| 208741 | gccctagaga ttgtgactta atttagctgt ccccaacctt tctgatacca gggaccagtg |
| 208801 | tcatggatga caatttttcc atatactggg gcbgggtgag gagatggttt caggatgatt |
| 208861 | caagtgcatt acatttattc tgcacattgt aatatataat gaaataatta tacaactcac |
| 208921 | cataatgtgg aatcagtggg agccctgagc ttgttttcct gcaactatac gatcccatct |
| 208981 | gggggtgatg ggacacagtg acagatcatc aggaattaga ttctcataag gagttcacaa |
| 209041 | cctagatctc tcgcatgtgc agttcacaat agggtttgca cccctatgaa aatctaatgt |
| 209101 | gactgctgat ctgacagcag gaggagctca ggtggtaata tgagttagca atgggtagtg |
| 209161 | gctgtaaata cagatgaagc ttcactcact cgcccaccac ttgcctgctg tgtggcctgg |
| 209221 | ttcctgacaa tcatctggtc ttctcactgg tattcatttg ttcaattagc atttgttgaa |
| 209281 | attcacatct atgccaggtg ctaaacccat atctgtgcca gtggccacga cctgacagtc |
| 209341 | atctggtctt ctcactgatg tccattcatt caattagcat atgttgaaat tcacatctat |
| 209401 | gccaggtgct atattaagta ctgggaaatt agtacaaaaa atatagacct tggagattcc |
| 209461 | agtgcaatgg taaaaatgga ctagaaagca acacactggg ataactactg cagaaaggtc |
| 209521 | agaggttaag tcacactacc tagggggtgg aggagattgt tggaaagaaa gaaaggatca |
| 209581 | ggaaaggttt tgtggagaag ctgtagtgtt ggcctaactc tagaactgaa gataaagaaa |
| 209641 | aggaagaaaa taggtgtagg agaagagaaa gggtatctta gagaaatgaa acagcatatg |
| 209701 | taaaagcctg gatgcattag aaatcaactt gcagccagcc tctcatctta tgttttctct |
| 209761 | aacttatctt gtatatcatt gttgaaacat ttttctcaca gcactgtatt acacccatca |
| 209821 | atttcctgct caaaaatact ctggatcctt actaataaca gaatgaattc tgcactgcag |
| 209881 | acgtgacatt agggcatgcc agatcctcct ctaaagcatt taaactgtcc tcttcattgt |
| 209941 | ctatctgaag accccaggta tgttttcatc tcttcatttt tgcttatatc attcccctgc |
| 210001 | accagaatgt ccctcctact cctttgacca tgtaactgaa tcctcccttt gttcagggtt |
| 210061 | ccttgatacc actccatctc tcatctcaat cttttagcat ttatgtttac ttttactatt |
| 210121 | cttgtttgtt ggtaattaga tggtgcccta aatatttatc tatatcttta ctttttaatg |
| 210181 | aaattgtaaa ttccttacag aaaagcatag gaccacattc ctttatctct ctttctgcat |
| 210241 | atggtacaat gccttaaaat aaacaaaatt tatttttatt actgataaca aaactgaatg |
| 210301 | acaataatat aatgagtttg gaaaatggag aaaccaagca tttgcataat tgcctagtct |
| 210361 | ttgatcattg atgcacacta cttttacata attataatga gagtatacaa attgttctgt |
| 210421 | attctgaaat tttacttgac attgtatcat caacatttgc tatgaaaaat aataaatatc |
| 210481 | agcbgggcaa ggtggctgac acctataatc ccagcacttt gagaggccaa ggtgggcgga |
| 210541 | tcacttgagg tcaggagttc gaaaacagcc tggccaaaag ggtgaaaccc tgtttctact |
| 210601 | aaaaatacac aaaaactagc tgggtgtagt ggcacaagcc tgtagtctta gctacttggg |
| 210661 | aggctgagac atgagaatct cttgaaccca ggaggcagag gttgatttga gccaagattg |
| 210721 | caccactgca ctccagcctg ggcagacaga gtgagtctct gtctcaaaaa aaaaaaaaaa |
| 210781 | aagataaata tctttggata ataactaaaa gcatcattta cctggtgtgc caggtactgc |
| 210841 | tttgcttaca ctgtttcaac ttttgtatgt atgtccttat tccaattcca tgaggtaaca |
| 210901 | ctggtgttat cctggggaaa ctgggagcac tgagctcaaa aagagtagag ctgtgctact |
| 210961 | tactaggtga ccttggatac ttattttact tagcgaatcc tcagtttcct tatctctgag |
| 211021 | atggggataa taatggttcc cacctttcaa gattttgagg ggatgaagtg agatgatgga |
| 211081 | cacgaatagt gcctggcaga tggccaacac tcagtgtgct ttagctcttg ctgccgtcac |
| 211141 | tgttgcbggt cccattttac aagtcaggaa actggatcaa aggcatttaa taactctccc |
| 211201 | caaatcacac acctggtgtg tgacagagcc aggattcaaa cccctgtccc aattatgaca |
| 211261 | tgagataggg atcacagaat ttaatacgat gttgtccaag tgtaacattt tacaatttag |
| 211321 | tgctacagag aacatgtgca gagttttgag agaaaacaca gttggatatc tacagattat |
| 211381 | cttctgcttg gagagaaaga gaaattgaga gagatagaga gagagagatt cccaggggcc |
| 211441 | cgagctctct acagcagcac agcatggctg ggtcagggct caggatagaa ttcctgactg |
| 211501 | cctcctccca ggcggtgtca taactggggc ttctgaagcc caacacctgg gccctctcct |
| 211561 | tgggtctcaa atggagggtt gaatcctctc atgctcactt actaacaaga acaattccca |
| 211621 | ctttcaatgg ggtaacagtc tgaggggaaa tgggctaggg ttttgcctgg aagtacctag |
| 211681 | ttatttctta actttgtagt ttggagattc agcataaaaa ctgaagtcag ccctgttagt |
| 211741 | agtattgctg cttatacagc cgtccaccct tatcagaggg gaataccttc caaggctccc |
| 211801 | cgtggattcc taaaaccaag gatactactg aacctgattg ctgtcaatca gaacatattc |
| 211861 | ctgtttatgt cttccaccac acatttaatg ccttttctat cttaactaac cacttatcac |
| 211921 | acactgtggc cataactttt gcagtttgaa gtacaacaga aaaactagca agaatttctt |
| 211981 | ttcccttctt cacaatttca ggaagagaag acgtcttacc atagatctta gcaacctcag |
| 212041 | catacttttt tttttctgcc ctcattaggt tgagaacttt cccttattca cttaaaggag |
| 212101 | gcactttgtg gcttctcttt ggcatatcca aattgccagc atcactaaac ttatgctttg |
| 212161 | ggggcattat taagtagaat aagggttact ggaacataag cattgtgata ctgtgacagt |
| 212221 | caatctgaga acccagaggg ctactaacag gaggagagtg cagactgtgt ggatttgctg |
| 212281 | aacaaaggga agattcactt cccaggctgg acagcacagg atggcatgag atttcatcat |
| 212341 | gctactcagg acagcacaca atttaaaact tatgaattgt ttatttctgg aattttccat |
| 212401 | taaatatttt tggactgcag ttgactactt gtaacaaact gtggaaggca aaactgcaga |
| 212461 | taagggggaa ctactgtaat agttactgct tatactgctc ttgctatttg ccatggacta |
| 212521 | agctaaacac attacataca ttattttcta taatggatgt gacaatccta cagagtagct |
| 212581 | actattatct ccattttaca gatgaagcaa ctgggcatct taaccattcc agctactgcc |
| 212641 | atcagcattt gccttaggaa aaaaatgtgt tttgaataat cacttccagt atttgggatg |
| 212701 | attttcaata attctaccag cctaactatg aagttatatt atctaggagg cctctagttc |
| 212761 | ttatttttaa tctttgtacc ttcgagtagc ttcttacctc tgtaactcac tcccacagta |
| 212821 | atatttcatg agaagccaga ttctctggac tattggttaa attcttttag atggcagtgt |
| 212881 | ttgttatgaa aagacttttc attcttctgg tcccttcact ggaaacagct agaaagtaca |
| 212941 | agttttgatt acagttgcct aaacaccagt tttgaaatgt ctttcatttg cttgagcaat |
| 213001 | aaatttgttg ctcaatcata ctatcaaatt gaaaacaaga ggaaaggaaa gtcaacctaa |
| 213061 | cctaacccaa aaggggaaca tgtttcctgg gatgagaatg tgtcaaaggc agcatagcat |
| 213121 | gacctaacac ttctgtgtaa tcgtggttgt atcatgtgtt atgggtaaat tatctattct |
| 213181 | gtaagttagt ccagtgtgtg cttcttcaac taactgtgaa agcattcttg aaagaccatg |
| 213241 | aaaccttatt attctaatta ccaacacaac ggattgataa atgaatgatg aggccaggta |
| 213301 | ttattgtcat taaatagacc tcgctcaatt atttatcaat gagtctgggg ttacagctca |
| 213361 | gagagctgtg catattgtag cacggtttgc ttcagctctg agacctgaag accagattac |
| 213421 | agtcttggca ggtggctttt gttgaatgca attcaagggg gtggtacaca tttgtttcag |
| 213481 | tcagacattt ggatggtttg aggccaacag atattcaaag tttatccaca aaagcctatt |
| 213541 | tcattttaac catgtagaaa aatctcttta atttattcag ataaatacaa atgagtagga |
| 213601 | gaatggatta gctgtagaaa atcatacatg taaagatgtt ttcttgcatc ttagtgttct |
| 213661 | aaagactgtt ctttattttc ttagattctg ctatctgtca tggacacttc actgttctgt |
| 213721 | attgatcaat gtttatcttc atatgagatt tgtttttgta tcttctttct aattgtacaa |
| 213781 | tgaaatatgt tttctggtta agaaatacgt tatcaaggag gatagaattg ggtgatacta |
| 213841 | gtttttttcc atcctgaaat catgccagct cattgcaaag gtcagccctc aaaatagtat |
| 213901 | taaggcatgc cctctccttg agtctctgat accttgcagc ccaatgtccc ttcttgaagg |
| 213961 | cctgtcacct gcaagagtac tttcttacat cctatgagca tcagatatgg gggaatgaag |
| 214021 | aatctcttct tgctaaacaa atattcttgg tccaccttct gccccctggc tttattttaa |
| 214081 | acccatcccc aacatatctg atgagttgag tctagtaatt ctgtcttcag tgggctatgg |
| 214141 | ggagcaggga ttagctaaaa tggcbgttca gggacctctt tggtataaaa cttggtgggg |
| 214201 | gtgctggcag ggatctctca gagaatgaag gaggggatag agcattagag aagaaaagaa |
| 214261 | attcatacct gagattatgt aatagataat agagtctgga ctttgtttaa aaaccagaat |
| 214321 | ctaagatata tatgttgagg ctagggcggg gtagtaattg aaagagaaat atgaaactat |
| 214381 | acctagcgtc aaggaaaact aacagtaatt gaagagacaa aaataaaact tgtttatatt |
| 214441 | gttcaaagga aaatgatatt tataacatct gacaaaaact ttattaatgc catgtagaca |
| 214501 | gggttttata ttattaactg agtttataat taattttgta ctgattttaa tttgactgtt |
| 214561 | accttggctt ccttctctgt ttcttaagtt ttgctagttt aatgttcacg agctcacaaa |
| 214621 | attaaaaatc ttggtagaaa tatggagtag ctatttcttt acatcctttt tagaacaaag |
| 214681 | ttgtgctttc gaattgacca cttatctaga aagtgatata aatctaataa gcaaaactgg |
| 214741 | atgtctttta aattatctgt taaataacta gagcagtgga gatgtcctga aagtgagcac |
| 214801 | tttattacat atgaaaaaca aattttaatt ttactactaa gaagaatttc catttctcta |
| 214861 | tttatatgtg ttcattattc tagagattaa tatgataact cctatgtata cttagttttg |
| 214921 | tgaatttcaa aattcttgat gccaaataac tgaagtatag taaattctgc cgtaacatga |
| 214981 | tgtatgggtt cctaaaaatc ccgacactat gcaaaattgg gcaataaaaa cacattttac |
| 215041 | taaaaaaatg gggataggca cacaatacct agaaatatca ctagtggcac attacaaaaa |
| 215101 | atatgggaat ttagtaacaa tgacagcaat attttacaca tgttaatggt taagaaattt |
| 215161 | acaataaata tggcagttta ctttgaaaaa gacctaacgt tccctgtgga agttggcctt |
| 215221 | caaaagggtg cagcttgtga gtttttgaga agtgttggga ggagagtcgt tgttgtccca |
| 215281 | gttgtgagca ggtggggctt ttctacctgt gtggggaagt gtggtagctg atggatatgg |
| 215341 | tatgtggatt ttgtgtattc ctacgctgct tggtttagct gggtgcagtt ttctgcattt |
| 215401 | acctggcgtt tcttgtggat agaatcacat ataagcaaat cccagacttg tgttgtgatc |
| 215461 | aaattgttcc gtaatatatc aatcatgtta gaacaaggtc acggtttcaa aaccggcatt |
| 215521 | gccgtagaat tgactgtgta ataatccctt caacacgttc acatctatga tcccaccttg |
| 215581 | ttcttgccac catcttagca agcaggggtg cgattgcctg accatttgtt tgttttctgg |
| 215641 | gaaatcttga cctattaaaa gccacacagt tactgaggaa acctgtgtca gaccttgcct |
| 215701 | aggtctgtgt gagtctgagt caggtttgct ttcctctgaa aaatcagaca ctcatgtatg |
| 215761 | tgggacaaag agcatcagaa acatgggcaa ggtcatagag acagatccca gagactggat |
| 215821 | tagaacccaa cttgcttgat tttctgctta gaggcttcag ttcaccattt tagaaagtgc |
| 215881 | ctgctggctg ccaccctccc tcctgtctta tcacctctaa aagacattgt taatgcttag |
| 215941 | acaggatgtg ttttcttcat tgcatggatc taaaaaccca gccatgagaa cttagttttt |
| 216001 | aatttttgcc attgctttat tggatatttt agaatgtgca aaaggtttta gaaattgttt |
| 216061 | ttcaactaat tttaccagca cagaggtcat gtcaaatgtc agggtgtttg acaacaaggc |
| 216121 | caatctagtc tatcaattga gtttcagaga agattaatga taaagggtgc aatcccaaag |
| 216181 | tctgggaatg actttgcttt caagcattaa ttattgtgga aaataaaatt attagatact |
| 216241 | cccttgtcta catctacccc aaactatgtc aatcagctct atttctagaa ggtttacatt |
| 216301 | tattaaacac tccctgtggt caatgcaatg gtcaatgcta tggaagttac aacaagacaa |
| 216361 | gatattgtgt ccgctatcag gaaactgatt tgggagttct gtttgatgac cgaagagagt |
| 216421 | ctttaccact gtgcctatat ttttatgcca gaatatgggt gggtgcacat gtacaggtga |
| 216481 | gtaatgaggc cccactccct agtattagtt aagttagcag gtgtgtgctg tttttttggt |
| 216541 | cactgtgtat tgcaaaattc tgagtttggc actgatacta aggaacatct tacagaaaaa |
| 216601 | attccccact gacccttctt ttttttttct ttttgaaaca gaatctcact ctgttgcccc |
| 216661 | aggctagaat gcagtggcac aatcacagct cactgcaacc tccgcctccc aggttcaagt |
| 216721 | gatcctcctg cctcagcttc cccagtagct gggactacag gtacacacca ccacgcctgg |
| 216781 | tcgatttttg tatttttagt agaggcaggg tttcaccatg ttggccaggg tggtctcgaa |
| 216841 | ctcctgacct caagtgatcc acccaccttg gcttcccaaa gtgctgggat tacaggtatg |
| 216901 | agccactgtg cctagccaga cccttcattt ttaaaagttg actttatatg ttaataggag |
| 216961 | tttaattata gtcatatgtt gaagggtctt ttctgtaaaa ccacatattc caggagccat |
| 217021 | ccaactgagg acagcattgc acttgtggaa ccacaatcca ggcttgggtt atctgtttct |
| 217081 | atcatgacag aggctactcc atcacttaaa ctatatgttc tgcagccccc gagagctgaa |
| 217141 | gacaagcctg gattgcctct atttgtaatt ttcttttttg taaatttttt tttggtaaat |
| 217201 | tgtttttcaa acaaacaaca aaaatgactg tcccagtcag ttcaagctga tagaacaaat |
| 217261 | ggccatagac cgggtggctt aaacaacagc catttatttc tcacagtgct agaggctgaa |
| 217321 | agtctaaaat cgaagtgcca gcatggtcgg gctctggcaa gggccttctc ccaggttgca |
| 217381 | gatggctggc tccttgtgtc ttcatgtagt ggaagcaggg ctagctagct ctctggccac |
| 217441 | tacttacaag ggcactaatt ccattcatga gggttctacc cccatggcca attacctcct |
| 217501 | aaatacccca cctccaaata ccatcatgtt ggagattaga tttcaacata cagattttga |
| 217561 | tagggacaaa aacattcagt ctataacaat gatcaaataa ggttacaaaa attatagtgt |
| 217621 | atgtagcatg cttgcattat gttttgatga attaatgttt tttattatgc ataccaaaga |
| 217681 | aactaatgca actgctgtaa atgtataaat atttgggagt aatgttaaag tttacattta |
| 217741 | aagccctttc taaatgtgag gccgaaagta ttccttttct ctctctttct cttctcaacc |
| 217801 | ccatttactt tacagaatga tttttctgtt ttaagtcata attgcttttt ttttacagga |
| 217861 | ttaagtacca ggtcattaag tgtgttctat gtcagtttga cctaacctct ctgccctttt |
| 217921 | cttttttcta aaggaattct ttaaaaagaa gaagaggaag tattttaaaa taaacatttg |
| 217981 | actgccagaa tgtgatgtaa acttcaggtt caattctaca cttgatagaa atgaaaagaa |
| 218041 | ctagtgttct ctattttgac atttagcatc aattcccttt cagtgattcc agctgattag |
| 218101 | taagtgagac taaaatatct tactcttcct ggtcagcatt taaaaattta aacatggatt |
| 218161 | gaaaatttct aggttatgaa atacagtcta ggttcacctg tgaaggatct agaagaaata |
| 218221 | agactgcaga cctggtaaat tcaaatgtcc actacttctg tattctagtc attgcaactc |
| 218281 | acctcctttt atcccttatg ttatttttat tttctcaggg aggcaaaaaa atttgtgagt |
| 218341 | gaaaatgaag gggctcttgg gaaaggaaaa ggaaaacggt ggtttgcatt taagatgatg |
| 218401 | atggccaagg taggtatttt tatagttgtc tggtttatgg catattgcct ctaagaagaa |
| 218461 | cactggttct tttctaaagg ggtgaaaaaa atcttacatt ttgtatatat aaaacacaaa |
| 218521 | tactcataca gtatatacac agtatatctg tggtattgaa atttacaggg gagatttaaa |
| 218581 | aaattgttct tagaagagtt aaaatgaaaa ataagtcaag aaatacagat ttatggcaaa |
| 218641 | agacttactt gtgtgacttt agcacttcca aatataaaag attgcatcct ttttcatttt |
| 218701 | cattctctgg aagtgaaggg gttctggtca agttgttttt ctcaaagtat ctgtatagtt |
| 218761 | tttttctacc aggaacatca actatacatt ggacagaaaa taagaaaaca ataaatgata |
| 218821 | tactgataca aatatagatt ttggggaaag acagaaaagc aactaacatt tatttaacac |
| 218881 | ttactatgtg ccaagcactg aattgaattc ttttataaag ttatatttaa ttcttacagt |
| 218941 | aaagtaggaa catagatatt attatctcct ctttacaaat gttataccaa ctgtaagcta |
| 219001 | aatgtattcc cataaagttt tgtgaataaa gttcatatat cctaactttc atatatatat |
| 219061 | atactcacat acaatagatt aattttgtct gtttctacag tttaaataaa ttgaatcata |
| 219121 | tagtatctat gcatttgttt ctggcttctt tgatgcaatg ttatgttcac aagatatatc |
| 219181 | cacgttgttg tgggagttat acttcatttt tattcatgtg ttgtagtcta ttgtataaag |
| 219241 | atgctgtgac aatgtattta cccattctat tgtagatgga catttgggct gtttctagtt |
| 219301 | atgagtaatc tttttttttt ttgttcattt ttaaaattaa ctcatacaca attacttgtc |
| 219361 | ttctggtttg ttgaaacaat aatgcagaca tttgctacaa caatgactgt taaaatggct |
| 219421 | ggccacaaaa tctccagcaa tacattaatc tgaagggcat tcttgatgaa gttgactaat |
| 219481 | tttgccattt tcatccacct tatagtattt caggacagcc agcttaacct tccttttctt |
| 219541 | atgcttattc ttctttggag tggtgtaaga cttcttcctt ttcttagcac caccatgaag |
| 219601 | tctcaacaca agatgaagag tagactcctt ttgaatgttg tacccagaca aagcacatcc |
| 219661 | atcttccagt ttcttgccaa caaagatcag tctttgctga tcagtagaaa ttcctgtctt |
| 219721 | atcctagatc ttggacttcg cattttctat tgtatccaag ggttcaaact ccagagtgat |
| 219781 | ggtctttccc ataagggttt ttaaagaaaa tctgtgtttt ggtggtggtt ccactgcaga |
| 219841 | aggcagatgg gaaaaaaagc gtgggtgatc ttttgaactt cagacttgtc tcatgctatt |
| 219901 | atttagacaa tagtgcctgt ccagctccca cttcatccca gcatttgcat acatgcaaaa |
| 219961 | ttctctgcca cattctcatt cttcctggtg gtcctcttga ctatggatga cccaacattg |
| 220021 | gagttaaata gaaagaaggc cttttgcaaa atgattttat gacttgttgt cttctctttc |
| 220081 | aattaagctg accaatctgc ctctaccaga atgcagtgtc tcatgtcata caacttacca |
| 220141 | tcttgtattg aactcaccta tttgtacaca gactatcctg gtagatcaga aggctttcaa |
| 220201 | gacaggacct ggaaataaaa gacagaaaat aaaatttatt ttgtttatta tttttattat |
| 220261 | ttattttatt taattattca tattgagtcc ttcatacaat gaaaactaat taaacacata |
| 220321 | ctctgttcca atcaccctat tatgtgctaa tcccctgctt tcttattgtg ttatataata |
| 220381 | aatagcbgtt tctgagaggc cagcatattt tccataaaac aggggatcga taaacatttt |
| 220441 | tttgttgaat taaattggtc tggggttagt ggagaacagg gaaacaagtg aaacctactg |
| 220501 | tttccccctt tgactagaaa gtagtatttg ctgccagaga gacatttcca agcttactgc |
| 220561 | attgtaatgt tttgaggtgg gggataaaca tcttgacaaa tcaagaggtt ggactttact |
| 220621 | tttgtatttg actttctttt cagaaatggg caaaattcct ccgtgatttt gagaacttca |
| 220681 | aagctgcgtg tgtcccatgg gaaaataaaa tcaaggctat tgaaagtaag tccttatcag |
| 220741 | atctcaggtg gagaaggttg tcttagagaa gtatctcata agcttatcag atgcctttgt |
| 220801 | cagtttctgg acttttggga agactagaaa caaacaaaca aacaaacaaa aaccaaatca |
| 220861 | acaaaaactt tgtttatgcc tgctttcgtc actgtgaaga tttgctagca cttaccaagg |
| 220921 | acaatactgg ggaccccact ctcgtgttct accttagtcc aaaacattac cattctaacc |
| 220981 | tggttttctc tcctatacag ggaagtcact attgtgcaca atgacattga atcatcttac |
| 221041 | ttggaaggca gagattttat tttggcaatg aacatgacat tgagaatata tactctcatg |
| 221101 | aatgttagac agtaatcaaa atgaacaatg ttttaacaag tgaagaagtc ttagtctggg |
| 221161 | cgcagtggtt cacgcctgta atcccagcac tttgggaggt tgaggtgtgc agatcacttg |
| 221221 | aggtcaggag ttcgagacca gcctggccag cgtggtgaat ccccgtctct actaaaagta |
| 221281 | caaaaggccg ggcgcggtgg ctcacgcctg taatcccagc actttgggag gccgaggcgg |
| 221341 | gcggatcacg aggtcaggag atcgagacca tcccggctaa aacggtgaaa ccccgtctct |
| 221401 | actaaaaata caaaaaatta gccgggcgta gtggcgggcg cctgtagtcc cagctacttg |
| 221461 | ggaggctgag gcaggagaat ggcgtgaacc caggaggcgg agcttgcagt gagccgagat |
| 221521 | cccgccactg cactccagcc tgggcgacag agcgagactc cgtctcacaa aaaaaaaaaa |
| 221581 | ataaaaaaaa taaaaaataa aaataaaagt acaaaaaatt agccaggcct ggtgcaaaag |
| 221641 | cctgtagtcc cagctactca ggaagctgaa gcaagagaat cacttgaacc cgagaggcgg |
| 221701 | aggttgcagt gagccgagat cacactactg cactccaacc tgggtgacac agccagactc |
| 221761 | tgtttcaaaa aaaaaaaaaa agaaagaaag aaagaaaaaa aacgaagtct taaaacctca |
| 221821 | ttttcaaatc tctgaagtag aataagcaat agtcatccag gagcttgcta tctgaatatt |
| 221881 | cacattgtgc ctttattttg tagaatattc ataggaagga aggaaggaag gaaggaagga |
| 221941 | gaatatagcc aatcaaaaac ctatttagtt tagtgcttta ggcttagaat aaggcaagta |
| 222001 | aacattttaa aatattgtaa ataaaaatag taaattgttt tttaaaataa taatctaaaa |
| 222061 | aaagggataa catttgaaac aattttgagc acaatctttc catattctgg tttctaacgg |
| 222121 | tttcaactag gatctgattt ccatccattc ctctctagat tggaggcagg ttttcctgct |
| 222181 | ggttaagtgt ggcgttgtat aattaaaatg gaggctccat agggagataa cacagctgat |
| 222241 | ggatagcttg ctgacatgat tgggcatgtt ttaggagtgg ctaaccctcg gttccctgtc |
| 222301 | tctcaatatc agatgggaat tattaagtgg caatgaatta aaatacatca gctcattaat |
| 222361 | tgtatcccct tccacacatt cccagtgcca tttctctctt gctttaattt cctccttaac |
| 222421 | acttaccgct atctaaaatg ctatatcttt aatttaattt tttgatgtaa tcttaattca |
| 222481 | ttttatgttc atttctccca atagatggga aatttagttt tgttcactcc tgcattccac |
| 222541 | ttggcactta ataaatatgt attgaataaa attacagaca aactcgctaa atgtctacca |
| 222601 | atctaggaaa aaaagaaagg aatttagata catcaaaaaa gagaagacat catggatttc |
| 222661 | ttaggtttca actgtacagc tcaaatgtgg taggttgaga ggcactgaaa aacaaaaggc |
| 222721 | catttggagc attacggtcc tgatacaata tatatagtaa gaactctgaa tttggtcttt |
| 222781 | gctttgctgc agattagctg tttgacttct agccagtcat ttaactcctc tggacctcag |
| 222841 | tctactaatt tataaaattg tagggctgag tcttgatcag ttgttagata aatcccaaga |
| 222901 | aatttgtaat taatgatagg taaatatata catttgaaaa ttatttttaa agcacactag |
| 222961 | agcaggttcc agcctatcct aatagtaata tcatgctcat ttgtgttcca ataggctata |
| 223021 | gccagtgaaa caaaaacaga cagaattatt tttattgcca gaaattgcat gcagcaagag |
| 223081 | ttacacatat gaccaccatc catcatgagt gtcacagtag aaaagacaga ttgagagcta |
| 223141 | tccaataata accttcagtt atctcctctc ttcttctctt cttctagtaa atttggaaag |
| 223201 | ccacgctgga aaattgaggc aaatgtagat tatttttctt tccatatata atttatgatt |
| 223261 | tgattagttt gtcatgactt cttcactgtt aatggtgctt tgtctcaact gtgaagaact |
| 223321 | gagctttatt ttttatttta tcaatattca ccacaccacc atttattgag taccaccatg |
| 223381 | agtcagatgc tctacaaaca ttgtttcatt taatcttcag tgttcctgca atgtgcacat |
| 223441 | taaccttcct attttatagt tgtgattaaa taactgtccc agaattagta gcagagctga |
| 223501 | aatataaggc aaaatctgtc tgggttcaaa acgtatgctt ttccatgtgt taggctgctt |
| 223561 | tctcctttag ggaaggtttt acatactttt tctttttaaa tatgttttgc accagttcat |
| 223621 | aaaaagtatt ctacgaggcc gatggcagga tgagtagtta tagattttct tgatcgttat |
| 223681 | caaggaatta tttttcattt tctcatgtat ttacttttta gtgagtgatt tatttaatta |
| 223741 | tatgttttgt attctatagg atgcttaatg tactgatttt aatgataacc atgaggcttt |
| 223801 | gggctatagt attagttgaa aaaatatgaa acctatgtaa gaatatatta ttagagcact |
| 223861 | ggattggact atcttataaa aagtacccta ctaaatatag gtaaagcatg tatctgtgat |
| 223921 | cacctttgaa actgaactta atgcaaaatg ggaagaaata ggacatgcaa tggattttct |
| 223981 | gagttgagga ctttttgacc cctaccacct ctgtagtttg gacaatctgt tgaaatctct |
| 224041 | ggttctgttt ccacatttgg ggctactaca atatctacaa catcttgggt ttaactagtc |
| 224101 | actatacaag atcatttcca gctcaacatt ctatgatgtg taagttacag tcagttttac |
| 224161 | atgtatatgt aggcatgtga aattcattaa tcatactttt gattgataaa tcctcaaaaa |
| 224221 | tttgaatgca aaacagattt atactaagag gggactatat aattgccttc tcaaattctt |
| 224281 | tttgaaataa agttggttaa gtgtgtaccc tacttataga atacatattt aattataaaa |
| 224341 | cggatataaa tgcttttctc ttaaataaat ggccatttaa tcttacaaaa ggttcagaag |
| 224401 | tatcattgta ttccatttcg acatcagaat catctaatat atatcttatt taatcctcag |
| 224461 | aataagcctg acattattga ttaactgagc aaatagtgga tgcctaacat gtttctaggc |
| 224521 | actattgcta ctgccaaaga cagcagagac tctaccctca ttgatcttac atccaaatgt |
| 224581 | gttaatgtat gtatgcttgg atggggaaga cagaatataa tataagcaaa taaataatga |
| 224641 | cggtaattgt ggattgtagt aagtggcatg gtcaaaagag gagcbgttgc cttccattcc |
| 224701 | caacagcctt tctaatccac ttttccccac tctctgctca gtatctagat aataccaaat |
| 224761 | aagtattttt aaaatgtggc taaaggagtc caaaattaac agcctttact gagttttccc |
| 224821 | aaagctctgt ccaataattt gcagaatcaa gagcgggacc caaattagag tctaaaattc |
| 224881 | atactgtttc catcttgatt ccagtaagac ctagatctct ttattagtgt gaagcggatt |
| 224941 | ctcacctgat gactcccaac tctgtttcac ttaaaaaata gatttgataa ttcctgccac |
| 225001 | agaggatact gtgacgttat gcatcacttg ggaatactgt ggggttttac tgtcacgtca |
| 225061 | gccttaaggg gatcatgcct aaaactcgat ggttgctcct gtggacacat cttattcatc |
| 225121 | tcattgaact gtgtattttt ctgaagcaac tgcatgtttg tacccccagg aaatataatc |
| 225181 | tatacccatt gtgatgccaa cattattatt aagaccataa attaaataat tgaatgtatt |
| 225241 | tctagcbggg gattacaaat ttttctcagg atcaaaatct actttttcct aatagtagat |
| 225301 | tgcatcatca aaattatagt ttcagaaacc tatttttttt cagacaggaa atagctttgg |
| 225361 | ataggcaagc caaagcacag ggcttaaacc ttatgtttcc ttgctgccct aaggattcta |
| 225421 | gaaaatacaa atcaaatttg tcacatttaa ttccctaccc ctaaatagtt cgaaaaaatt |
| 225481 | gtgcttcaca ttctagccta acatgatggt atttatattg tagtcacaca gcaggtcatt |
| 225541 | taattggtct tttcccattt agaaatactc atatttatct gcttgtctta ttacccatct |
| 225601 | attcaagagg aaatgatgtg ttatgacaga ctacaaatta ctttgcctta ataataaaca |
| 225661 | accagaaaga gagttgaaat tttaacttta atttgaaaga aacaagaata ttcaggaaca |
| 225721 | agaatatgct taagcataaa gcctcagttt aatacgtatc agagactctg ttttttggtt |
| 225781 | gttgttgttg tttgtttgtt tgtttgtttt ttgagacaga gtcttgctct gttgcccagg |
| 225841 | ctggagtgca gtggcgcaat ctcggctcac tgcaaacctc tgcctcctgg gttcaagtga |
| 225901 | ttctcctgac tcagcctcct gagtaggtgg gattacaggc tcctgccact atgcccagct |
| 225961 | aatttttgta tttttagtag agacggggtt tcaacatgtt gaccaggcag gtcttgaact |
| 226021 | cctgacctcg tgatccacct ggctcagcct cccaaagtgc tgggattaca ggagtgagcc |
| 226081 | accgtgcctg gctgagactc tgtttttata cattaataat ttactatgga agcagcattt |
| 226141 | atcagtctga ttaaagaaat aagaattggt cattatgggc atcaaatttg tgaatctgac |
| 226201 | tggctttagc tgattgatgg atattatcta tacctattgt ttcagaaaca catattcatt |
| 226261 | gcatgtttat tgtatatatc atagtcttaa gaaaattaat tgaactatgt tttacttaaa |
| 226321 | gggccatata gcagtgtggt taagagagat ctagatttgg agtcaaacac ctgtagctca |
| 226381 | agactgcctg gtttagaagc ctggcttcct tgtttactag ctatgtagcc tatagatcta |
| 226441 | agtctctgta aaatgggaaa acaatagttc ccatttcgta gggatttgat gatcattaaa |
| 226501 | taagttaata catatagatc aaattggtgt ttgaaacagt gattcactaa atgttaccta |
| 226561 | ttattaatca acttttgatt cagtcaacaa ctgtgttaaa gtttttgttt cctgattcat |
| 226621 | agtgggacta ataatactta acctcattaa gttctagtgg cagcataatg agttgatgct |
| 226681 | gataaagttc ttggaacaca taactgacca tcaagatata ctagctatta ttattattat |
| 226741 | tactcatttt gcttccttac actgagagat taagtatgtt aaaattgcta ttcttttcat |
| 226801 | ttatgctctt ttagtcacac taatcaggca tttcttttta gtgaacatca gttttagtta |
| 226861 | acaacatccg gtaggataga accactagat aaaagggata aagagggaag atttcttctt |
| 226921 | ttttgttttt gtgttgagac aggaaaaact ggagttttat gacaacttgt tgtttcattt |
| 226981 | tctctacttt aagatcttca tttgttttgt tactgtgttt tctcctctgc tattgatagg |
| 227041 | tctagtgtgg aagaaacttt gtcttctgga tttcttagtc tcttccacct gtgtctgggt |
| 227101 | ctttcctata atcgttctag ttttaatgaa atctattggc ctgcaattca ttttctttac |
| 227161 | acttaagatt ctgtaaagac tcaacctcca aataaaatag ttgtgaagcc actctcaaat |
| 227221 | ctgagaactg gagtttggaa gttttggact ctaaagtata tttcattatg atgcttaagc |
| 227281 | atgttggagg aggggatact ttctgaaaca tcttaattca cttctgtctt ttgcatttaa |
| 227341 | gtatatttgt accctacacg caagaaattc atttgtcagg gattgtgtgt aggtgctgag |
| 227401 | aggatgggcc gtggcaataa ttagaaaaac aaaagcataa aaagtgagga aggaagaaag |
| 227461 | gaatggtggg ttagtatcct atatgcggga tttcatactg gaagatctta catgcgattc |
| 227521 | cagggaaaaa cttacattga tacctagtga ccaaggcttt cctccagtaa atgagtaact |
| 227581 | gtaatgagta acaaactgta agtccactgc cttcaataaa acatgatgag tgaacctggc |
| 227641 | tgagcagccc tcaggtagtc gttaccagag aatgtagata acggccatga aatggtatga |
| 227701 | agtcactggg agccaagtgg gtgatcagat gtcctaggag aagcagacca gtgcacctgg |
| 227761 | tgacagtgct gggctgggct gaggtagggt ggggtggggt tgtgtatcaa aaccacacac |
| 227821 | ccttagaaac cttatagaac tctgcacccc tcggcaatgt gaaatcaatc caaattctct |
| 227881 | tgtgagcata aagaaaaata ttgacttcaa aatcattgat tttttccaaa atatccattt |
| 227941 | aaagattgac ttcttaagtt tctaaaaaaa aacctgccac tgttttacag gaataagaaa |
| 228001 | gatggtaggt aaagaataga caaaggggcc aggtgcagtg gctcactcct gtaatcccag |
| 228061 | cactttggga ggctgaggcg ggtggatcac gaggtcagga gttgaagact agcctggcca |
| 228121 | acatggtgaa accctgtttc cactaaaatt acaaaaatta gccaggtgtg gtggtgggtg |
| 228181 | cctgtaatcc cagctactca ggaggctgag gcaggagaat tgcttgaaac tgtaaagcag |
| 228241 | aggttacagt gagccaagat tgcgccactg cactccaacc tgggtgacaa gggcaaaact |
| 228301 | ccatctcaaa acaaaacaaa aaaagaatag acaaaggtcc agaaatagag gtgttactgt |
| 228361 | cctgtgaggc cggcctcatc taagtaagta gaggctggaa tttgctaccc atgaaccttc |
| 228421 | cttttccatt gataatgctt ccccactgat aatgtttcaa agccagaagg ctccagaaaa |
| 228481 | tcattggtca atagagatgt ttagctgaat gttagctgaa tgggacagaa cacatgggct |
| 228541 | gatgcagcca gggactgaag gtgtttgttg ttttttcttg ggcaactgac aatgataatt |
| 228601 | tggaagattg ggaaagctag caacttggtg ctgaatctta aatgaccgtc aaagaaactt |
| 228661 | ttgcttttgt aaatctatga aatctgaacc taagacttaa cctcttcatt tttcttcttc |
| 228721 | cactctctgc tttaagaggg tgcttttttt ttctctctct cccaatgaga attaaccaat |
| 228781 | cactttactt ttcacttctg ggggcagggg tgagttgact gaacattctt gcctattgcc |
| 228841 | tattcattcc ccaaagctga agtggttttt taaaagtcat gctcatcacc ccttcctctg |
| 228901 | gccctaatgc ttaacacctg tcaatgactt ctccttacat tttaaataaa attctcactc |
| 228961 | tttaccatgg gttgagaggc cccacacact gtggtttggc ctctccatcc ttatctgtca |
| 229021 | ccactttccc tcattcatgt actccaactg cacaggcctg agttttattc ctcagtagtc |
| 229081 | ccaagccctt gccccttagg atctttgttc tggctttttc ctctgcttga gctgctcttc |
| 229141 | cccagctcag catgttgctg tcttttcttc aaacttcaga tctctgctta gatgacatct |
| 229201 | ctgatgttct ttccttgaca aaactttcta aagctacccc tttcaatact ttcccttccc |
| 229261 | tcctgtagga cctgctatta tctctatctc tatctcctgt catctacatc tatagctaat |
| 229321 | gtctatgtct gtatctctat ctctgtatct ttctatgtat cttacatatt tgttgtatcc |
| 229381 | atacctcact aaaatgtaag ttctattata gcagcacccg tatctatgac attgtgcttc |
| 229441 | acatctaaga taatttctgg cataagatgt gtggagtgaa tgaatgaatt tcagctttta |
| 229501 | taccatccct gtaaaattcc agtaatgggg gaaacagcac agaactgctt gtaagataac |
| 229561 | tatccgtaaa ggatgtggta aactcttttt gagaagaaca ttgtttgcct gagaaaagga |
| 229621 | agagaaaata gcagtaatta taattatagt gatagctaat tactagctag gcactgtagt |
| 229681 | tacctttaca tatatttgct cagttatcag tattaactca agaaataaaa tgcactctgc |
| 229741 | aggtggcaat catggctgct cagcaaaagg cagctttccc ttggatggac tatgatgggg |
| 229801 | taggtcacat gcagtctgca taactgcatt ctacgtacct tctacattcc acatgacagg |
| 229861 | gaatgcttcc atcatgatta acattttctc ttcctgaata gagagaaaag aatgctatag |
| 229921 | cctataaata taaaaaggac caatgcctca caattaatgg attcattttg aaggcaacca |
| 229981 | agacaaagct ctttttgttt gtttgtttgc tttgatctct cttcaaactt tttattttct |
| 230041 | ttgtaatagg tcagtttggc tcctcagtgg cctcatactt cctcttcttg agatggatgt |
| 230101 | atggagtcaa tatggttctc tttatcctga catttagcct catcatgttg ccagaggtga |
| 230161 | gatctgactt ccagtttaca aaacatgctg aaaaatgttt ctcctagaaa agtatttatc |
| 230221 | tcttctttaa agtagaataa ttaactggct attttcacgt cttagagtca taggatttgt |
| 230281 | aatgagatta accttcaaaa tggtgcccat gggccaaagc tcccaatcct tgcactaaag |
| 230341 | ggggtgtaag cctcttgaaa ttatataact tatgtataat ttcacatgta tgtttaaatg |
| 230401 | tgtattttta tgtggaaagt ttcatggctt ctttcagttt cccaaggggg tccctgttcc |
| 230461 | taaatgttaa aaactattgt tcaagaggaa gactttgaca ccttgtgagt tgtatttctt |
| 230521 | tattttgcca agttagcttt gaaagaaatg cttccttaat gcaactcaaa gcctccagat |
| 230581 | tttctatact gaagaaacac aaaatgaaca ttttccccct aagatacaaa gtaagataat |
| 230641 | gcccacaaca cacacacaca cacacacaca cacaaatagt gggatgggat gagagtggga |
| 230701 | tgggatgatg aggtccaaag tcagaaacta aaacacatag agggtccaaa tcaaagaaga |
| 230761 | caaagccctg agctaatgtg gggaaagggt cagctgaggc caaaaagcta gactgaggtc |
| 230821 | agagccttca ctcatatgaa gttaaatgat tctgacacct ttgaatgctt accttacaga |
| 230881 | agttggatta ggttttagtt aacctacaaa ggacctttta ggaccagtat ttcaaagcaa |
| 230941 | atttggtcca tacagcattg acagtggcca aaatttggtg gttttgggtg actttttatc |
| 231001 | ccgatagctt caaatcagtg ccagtttcta tactaagact cctattaaca taataataat |
| 231061 | aataatgctt tacattcata aagagatttg agcttttaat agtacaaagc actttcactt |
| 231121 | cttttactta ctgtgcgtca caacaaattt atgatgtaga ctgtagaaga cattttcttc |
| 231181 | acccatttaa aacatgtaaa tggagtcaca taatgctgat gtgacttagc taacatcttg |
| 231241 | gaatatattt ttttattaag ctgatctagg actagaaccc atgattcaat ccctttctct |
| 231301 | aagattttgc actttaatcc actagtttta taatccttga gataattcca gagcttctaa |
| 231361 | agttgtctgg ctcgtagaag acagtgacca aagatcagag gtcctgtgta gtttatttcc |
| 231421 | caagtgcaca ctttcaggta atgaagctga atgtgtgtat tttatctatt tcaaattaac |
| 231481 | cccagctttt tttttttttt ttttttttgc ttacctttct aaggaaatct gaaactcctc |
| 231541 | cattccatca ctggctacta tgacgttact tagtgtcaga tgcaggtata aatggagttt |
| 231601 | tatcagcagc atttattctt tcccccacac catgctgcct ccatgtggag aaaatgaaag |
| 231661 | gctgttgctg atttatttga ataatacgaa attacagaat gtctgctatg tagtggatgg |
| 231721 | agtgcctacg tgttaggttg gatgtattcc aagagctagg aagcattctg tctttggata |
| 231781 | cccttttata ggttgtatta ggtgctgagg ggcatcctgt tttctgggca atgattacca |
| 231841 | actccagcaa aagaacaaga gaatggacac cctgcatgct gactttgcag aaccaccaga |
| 231901 | ggccagggca gtcatctcct ggcagcaacg ctgtattttt cagctgcctc tacccgacgg |
| 231961 | gctcactcag tattcctcca aggcaaatgc ccttttgccc caaggtcctg tgtccctggg |
| 232021 | caagcctgag accttgatct cctttgtcct ctgtgccccc gaactttggg gcgagacagt |
| 232081 | gtgtctggaa cccaccttct attctgttcg gaccaggaag ccagatgggc caaaggccta |
| 232141 | ctttgggagg ttgtgcagct tgtgcacagg gagtgagcag agattgatgt ccagcccttg |
| 232201 | ttcagtcaag ctctgcaccc aggcttcaag ccatattcat cttctgttcc cagctttagg |
| 232261 | agggaagttt ccatctcaca gaagaagcaa catctgcttg gtaagctatg ggggctagaa |
| 232321 | aggtgctctt tccagttctc accaaggcac cttcctatga ccctattctt gccctctcac |
| 232381 | tggcccactc ttcccagtac tattctccct accgtttttc tcttccaatc tggtagcatg |
| 232441 | aatttgaggc agcagtcctg aattagtgat gaagcagaca ccataatcag ggtgcaagtg |
| 232501 | ttctcacgtt gcagacaccc acaaattaca tgattggatt tccttgagtt ctctctcttg |
| 232561 | acatgaagga cagaatctcc ctccaccctc actcctaagg ggtattctct tatgaaagtg |
| 232621 | tgggtaagat tgttttgttg agtcctatgt gactcaaaag gctacctctc tcctttccag |
| 232681 | acttccaagt cagaacagtt tggtggtggt ggtggcaatg gggtcctcag aaagccctct |
| 232741 | ggggaatgtg gttgacctga ctgcbggtgg tcccctgaac ttggaatgca gggtcctttg |
| 232801 | cactcccttt gttcttacct ctggatttag tagtcgattc ccagaaaatg ggaccccaca |
| 232861 | tggagaccca aagagtcccc ataaaaatgt ttcagaaggg cttttaaaca aaaccatttg |
| 232921 | tgatcacatg tgtggctcag actttgtttc taattgttca ctgctttctt tgcttcttca |
| 232981 | tacagtacct ctggggtttg ccatatggca gtttacctag gaaaaccgtt cccagagccg |
| 233041 | aagaggcatc ggcagcaaac tttggtgtgt tgtacgactt caatgtaagt gtctccacac |
| 233101 | aagtgtattg gtgggaggat ggatttttat ttagtttatt ttattctgaa acccacggcc |
| 233161 | tcctctcctg ggtcaggctg aatgtcttaa gaaagacgtc cctgctccct ttaagaaaga |
| 233221 | aaggaaagaa agaaagaaag agagagagag agagggaggg agggagggag ggagagagag |
| 233281 | agagagagag agagagaaag aaagaaagaa agagaaagaa agaaagaaag aaagaaacat |
| 233341 | gtccctttat ataaatgtga ctatgattta ggacaatggt aatatgatta tatgggaata |
| 233401 | tagactactg gataaaggtg agctcagagt tcaaagactt gaagcaaata ttcttatcac |
| 233461 | tgactttgga aaagaataaa ggaagagttt gcaaatgtgc tttttggaaa atcttgttgg |
| 233521 | attcctaggg aattaaaact tttacacttc ctattaacct ctttacttcc taaacaagcc |
| 233581 | tcctatttag tattactcaa tagttagtac taaataaagc taaatattga aaactaagaa |
| 233641 | atactaaatt ctaactttta aataatacta aaattagtat tattccattg tagtattcaa |
| 233701 | atgagcatta ctccttgagc tcccttaggt agagattatt actatggaaa ggagttattt |
| 233761 | ctgtccattg aaaaaccatt ttggactata tgattcaagt cttcgacaac aatgtaattc |
| 233821 | cacatattct ttttttaagt agtgactaga ctagaaatgt ctggaagcat atgcgtggga |
| 233881 | aagtagccag gttgaaattg aggaattgat aattcaagta atttttggag gctagacaat |
| 233941 | gagaataaaa ttttatacag attgcagaat gaaggaggga aaagcagact gcctgtttat |
| 234001 | agtgttaata tgtatatctc acaaacattt tgatttctac ttttaacctc cttaaattgt |
| 234061 | gagtttccca aagaagagat caggtctgct acatcttttc agcccgtaat ctagtcctca |
| 234121 | tccactacag gctaaatgaa tctcattgac tgaaaatcct gagtgagggg gatgattcat |
| 234181 | agagccttga agtaagaacc acaggaccag tttatgtgag gagtaccaga acatgcaaac |
| 234241 | cttaagaaaa gtttcccatc tccgaatgaa caaagcaagc tattgagtta gcatgaggca |
| 234301 | caatgatagc aacaaatatg tggcatttgt aatcttcaat cacccctgtc agttggactt |
| 234361 | tccatttcaa ttcagcattt tttaaactga attataaact tgcataggtt ttacaaagat |
| 234421 | gaatgtgaca tgattcttga cttcagggta ctcgtgatat tagaaggaag acacgtaagc |
| 234481 | aaccagtata caagatgctg tgcacaaagt tagcaaaatt taaaaaaagg aaaaaagatc |
| 234541 | ctggggaact gagcaagtgg ttcttatttc ttcttaggcg ggtctgggtt ttacagaaga |
| 234601 | gatggcctct gagttggatt ttacctctct tttctatcac ttctagattt tatttctctt |
| 234661 | ttctaccact tctaacttct tccacctctt cctcctcccc tccctttatc cctcccttta |
| 234721 | tttatctctc tcactttcaa atttcaaata atgcattact atgtcccttt accactgttt |
| 234781 | taatttctca ttctcttcct ctgattagca aaatgacaaa cttccagtct gcttaataag |
| 234841 | aacaaggacg aagatcactg actttttctg ttttttaagg catagcagag aaaggaagga |
| 234901 | ctaaaaatat gaacaaaagg tcttttgatt tttatatata gatttctgaa gtttaaatac |
| 234961 | ttctgaattt cccaatgcac tgaaatggaa aattttgggc aaaaatgtcc atttgagatt |
| 235021 | tgaaagttag tgactcagtt gaggaagaca aacagaaaag ttgctgtaag agagttacta |
| 235081 | atgagtggac aagagggtct gagaggcaaa ttcaggggaa agtagaggga aagggtttgg |
| 235141 | atgatgagtg tgcttcccaa gattgtatca ctgcccttga cagctctctc acatccagtt |
| 235201 | tggtgaaata tgatttgtcg gtcagcaggg gatacagaaa ccagagtgtt ctatgatagt |
| 235261 | tatttcaagg cctgcctgaa aacaatacta aggcaatgag agaaatttta aaggtcaaga |
| 235321 | aaatataaga aagccattac actgatttta ttcacttaca ggcttgctgc atgctggtat |
| 235381 | cagtcattaa tttggtatgc atcattgctg gggttagtag tgattttaat agctgtattt |
| 235441 | ctccaatgtc tgcatcatgc agtgaactgt gattggtaag taaggtccct cacttcacaa |
| 235501 | cccacttcat ggtgggtatt tatatctgag actaagctcg agtgttctta tatgtgaaat |
| 235561 | ggagaaaata atagtatcta cctcaaaaag catcaagtga gataatgcat gaaatagcag |
| 235621 | atagctcaga gtatgtagca cacagtacag gctgagtatt ccttatccaa aatgcttgag |
| 235681 | accagaagtg tttcatattt caaatttttt cagattttgg catatttccg tatacataat |
| 235741 | gagatatctt gaagatgaca ttgaagtcta aacacaacat tcatttagtt tcatatacac |
| 235801 | ctgtacatat agcctgaaag tgattttatc caatatttta agtagccttg ttcatgaaac |
| 235861 | aaagatttga tggtgttttg actgtgacct gtcacgtgag gtgaggtgtg gaatttttca |
| 235921 | cttgtggcat catatcggtg ctcgaaacat ttcatatctt ggagcattta agagtttaga |
| 235981 | ttttttttta ttaggaatgc tcaatttcta aatattcctt attacaagaa ccataacttg |
| 236041 | accaaaggca aacagctatt aggaaaccga attgggatgc agggctggtg gtattacaca |
| 236101 | cggtaatgta tgtggatagt ggcaagctag taaaaggact tttattataa caaagaagta |
| 236161 | aatacataag taaataaaag tattctgacc ttaatgagga gttcttgaaa gattcaagga |
| 236221 | aaggaagcaa taggattata tagtcattat caaattgttc attgaataac attattattt |
| 236281 | aaaagaaaat aatactgctt taaggaattt tatatgatat acaagttttc atgacttttg |
| 236341 | aagtttgaaa gatttgtctt ttgttttggc aatgattata ttctaaattc agcaggaaag |
| 236401 | ataggttgat tcatattaag ggacactttg cttttacatt tttgtaagaa aaaggaattc |
| 236461 | agcccatcct acaataagct aataattgag cacattctct atactagggt caaaataatt |
| 236521 | tcacaagtac atcaataaga gagagggaag gacctttaat tattaaactg aagataacaa |
| 236581 | caagaaaaaa atgtacaaag cttaatttaa aatataggag atttggtttc acagtaaaaa |
| 236641 | tccaaaagaa taaagccaag tagtcactgg taataagaca ttatagattc aaatgagatg |
| 236701 | ctgtcttggt caggacgtgg tgtcctccac ggcagaaggg aagaggctgc ctgagcacag |
| 236761 | attgtcttga gtatcgtgca tagatggtag agatcagacg ccacagacag ccgtgggctg |
| 236821 | tccctttaag aactcccata gaatgggcag agatgtccta gaattggaca ataaggaaag |
| 236881 | agtacaagga aggaaaaata aaatctagcc aagctcaagg acctgtatgt gttacctcag |
| 236941 | gttaaccaga cgtttctcag aagacagaat ctaaatttct acttacattg cttttgtttt |
| 237001 | tattatcatt tttgtgaata ataccaaaat taatgtagac taagtactta tatgggcagg |
| 237061 | cactgtgctt agtgctatga tatttctatt tatttatgaa tattatactc atatatttat |
| 237121 | agtgatttat actacttgtt tcagtatgca tcaagaaatg gaaggcacag atatcttgac |
| 237181 | agagataatt taatataaga aattaaacag gtattgggtg actaaaaagg caaaagggga |
| 237241 | cattgaggta acatagaaat ggtaacaggt aacacagacc agtttttacc cctactgttg |
| 237301 | ggagaacaaa agaggaagtg gggttattag aatctagggg cttggaggaa gggcgctgca |
| 237361 | tggccccaag aggtgtgatg agattggttt tgagtgtgct cgaacagact ggaaatggaa |
| 237421 | ccaaataccg ttaccagagt gaagaggcat tgctggagcc atgcattcag gagagagcaa |
| 237481 | atcccttctc ctgacttttt gtctaagtgc ctcctatagg aaaaatctgc aaggaatccg |
| 237541 | atctcaaagg aaaaaagtag ctccccaagt cccgtctcca gcatcacaaa gcagcatata |
| 237601 | caaggatggg tctgaagctg aaacagctta ctaactggca cattattcta tttatattat |
| 237661 | gacctattcc tcttcctagt ccagtaaggt agatatgact attcctaatt tacagatgga |
| 237721 | gagactgagt tttagtagga tttggtattt tcctccaagt tccgtggatg gcaagtggag |
| 237781 | aggcbgggat gctcatctgg tctgcctgac atctctgtct gactctgaag cctaggacaa |
| 237841 | gctgcctcta cataggctac taggagccac tgagatggct acaggtttat actggaaatt |
| 237901 | cacaaaaata agagaatttt agaaatagag gtgctcttcg atatcttcca tcctatatct |
| 237961 | taccttataa agttacagaa attttgagtt actgaagcat gttcagggtc ttatagttgt |
| 238021 | taagaggctc ctaatctagt gttctcttca tgtcctgtat tccgcccgta attttcctgt |
| 238081 | tgtaatttcc agcaacattc tcactgactg ctcctggaac atttactgac tctgtttcat |
| 238141 | gatatatcta tttcacaagg ggaaatggag ttgaagcatt tgggccccat tttaatcttt |
| 238201 | cataataatc ttgtaattcc caaatcagct tctcaaatag aatgagagct ttcatgtttt |
| 238261 | tttttcctaa attctttttg tatcatttaa atattatgct ttattaaaat attcataatg |
| 238321 | gaaaatcata ctttgaaaat tgttattatt aattttgctt tggttggtta gcaaagttct |
| 238381 | atctttagtt tttaaaatta atttattttt gaaatagaca ataaaaatcg tatatttgca |
| 238441 | tgagttcttt gcttgatcct ctgaacaatg acttcataga ggtgctcact ctgtattgtc |
| 238501 | agatgatcta agtatacaac ccagtataca acccagtatt ccatctatca tggcaccatg |
| 238561 | gaggaaatca ttgacaaaat gtttttaaac tccttaaaaa ttcataatcc tgacttttgc |
| 238621 | aaagcccagg ggtgccaaag caggcatccc tgggcttttg aaaaatgcca ttatttaagc |
| 238681 | tagagccgtt atctaggcta tcattatcta ggtagagttt ggggtgtgtg tgacctcaat |
| 238741 | atgaaaacat ttggatccac tctcttggat ccaaagagat ggcatctgga ggctgtctct |
| 238801 | caaaggagat ctgagcagca cacccagcaa caggatcagc tgaccttgga cagactatat |
| 238861 | agaggtaagt tattccacat agaggcaggt gaacagaagc agaatagatt taagatctgc |
| 238921 | acttacagaa taatgtaaga taaacacaag catgatctct tatggtacag gagcctattg |
| 238981 | gatgggaagg atcagaaaat ctttggggta aggtagggga ggttgtgagg aactaccaat |
| 239041 | ctgtagagct tcatctggga accttggaac ctcctctcca tacccatgaa agcgcagtgc |
| 239101 | tctgtgactt agatgtatat atcacaactc atccaaattc tcttcagtta atagtagaca |
| 239161 | aacaccatac acaacatgca tgatcagcta gtctcagggc ttttcaaagt cagaatttac |
| 239221 | catttatgaa acactgtatt tttaaaatat tcttattgag tgcataatga tacatcttac |
| 239281 | tgatggtgct ggaaatctgt tttattaaaa tagtaagaaa cagagagatt attatgtatg |
| 239341 | caatgaatca aataagcaga aattgtatca tgtaaattaa tagaagcaga agaatgagtt |
| 239401 | taagtcagta ggaagaggat gtctttgttg gcaagatacc tggagagaca agggtgatat |
| 239461 | agaaatgata aagaagaaaa ggctacacag ttttaatatt cttgtgagga gaaagaagga |
| 239521 | ggaactaaag tggaatttgg aaggagcttc agctgatatc agacagtgag atcatatggg |
| 239581 | taaaggttta agttgtgagt aaagggaaat gcattctgct tttcaccttg agagcatctt |
| 239641 | gtacattgct gatggataaa tggtatgtct actttgcctc cccttttctg ctgattatca |
| 239701 | tagatgtggg agatagaaga tatcctacaa tgggcaggag aggagactta acacctatta |
| 239761 | tgtgttaagt aggtacatac attaaatttt atcctcataa caactgttta agatggaata |
| 239821 | tatcatccca gattattcct tctgccctgc ctgcctcaca tcccatcttg gaggtttgtc |
| 239881 | cttaaaggag acaggttaga cacatataga atgttaataa aaaggagata agttctttaa |
| 239941 | tcaacatcaa caactctttt cagtaataat gttccaaagt aaaggtgtct tctctcaaac |
| 240001 | atatctcagt tctcttaagt tccttcatct cttattgcac tggacacagg tagaggagat |
| 240061 | attttgtgat tcacacgtgg aataacacat cttttgtttt agaactattt cagtggttcg |
| 240121 | aatgcatctt tatttgaaaa ggtgaatcat tttaggtttc ctgaggtgta gacatcaaaa |
| 240181 | ttatgttaca tgcaggagat attgggggag ggaggcgtgt gaaggataaa ggagagagtg |
| 240241 | aacaagagta gacaggaaga gcttttagat ggtaatgcag gccctatacc tgtgaaagga |
| 240301 | gagagaaaag gaaggattta ggaagagtct cagattgtac tacagttttg aaagagtctt |
| 240361 | ggccaggcta acggtgagtc tctaaacaaa gtatgtccat tagataaatt ccatattggt |
| 240421 | tagcaataac ccagctccag tatttcccat catgctcagt cattatctag gtagtggttg |
| 240481 | gggtttgtgt gacctcaatg tgaaaacagt ttggtccact ctggtgggtc caaggaggtg |
| 240541 | gcatctggag gctctctctc aaaggagagc tgagcagcac gcccagctgc taccttgaaa |
| 240601 | atgtgactgg gctcctccac tttagatcat agctgttcat attgcbgttg ttgctgttat |
| 240661 | ttagtttcaa caggtttcaa atgcagccag aatgacctgt ttcccacatc catcgtctgg |
| 240721 | gcctacctcc gtgcbgggtc agcagaggct gaacttctag atcatgaata attcttcggt |
| 240781 | ggcatgaccc caagcgagac tgctaagcct cttgtggaca aatttagagt tataaatttt |
| 240841 | caaatccacc tagagatacg tctctttccc tagtagcaga gatcataact ttggaggggg |
| 240901 | tgaggaccct ctcatctgtg gatgtagtga gattcctcca atggctttgc tgagcagggt |
| 240961 | gggctgctgc tcaggcatgt aacgcbggga ctggcagtat caaagggctc tgtcccttat |
| 241021 | ttacttcact tcctcaatgt ccagtgtggg tctctttggt tcaacaggct tattaagttt |
| 241081 | gattaaaaga agatgcattt catgttctat tctaggtcct agatcacttc ttttgctttg |
| 241141 | taagcttctt aatttgctac tcctgagtga ctttatgaca cagctctagc ttgtgacgag |
| 241201 | agagattcct gggtctgctt ttagcttcct tggtatttta aacttgggga actgatttct |
| 241261 | taaggtctga agtcctagcg atgccttttt tttttttttt tttttttgct ttagtaacac |
| 241321 | attttagttt tcatcacctc cctcaggcta cacttggcca aaccaaaagt gagcttttct |
| 241381 | tttgcaaata ttagggatgc atatgatcct aatgctatac ttacaatatg aaaacagcat |
| 241441 | tccttctttg gaagtgacca tagaaatgag tcttcttttc attaacatag taaacatttg |
| 241501 | ttgggcattt gccaggtgcc aggcattaag caaagatgag aaaacccaag gtctctgtcc |
| 241561 | tcaggaacat aaagtccgag ggagtagtca aataatcaca aaaataaatc caactgtaat |
| 241621 | tgtgccaagt gctatgaagg aaagctatat agtgttaaga gaacttatag aagacaacct |
| 241681 | gatgtggttt aggagctaaa ggaaggagac agataaaaga aaatattttt ctctgagaaa |
| 241741 | gtaatgttca aattgggctc taaggagtca ggacaacctc tgaatttgaa agaagggaga |
| 241801 | gatattctca gcagtaagaa catcaattac agagaacgtg tgatgataag aggtggcctt |
| 241861 | attcagggga ctgagtaaaa cgagagagct cagaatgtga agggacatca gaacacaagg |
| 241921 | cattggagag acagaaggga accaaagcac gtgggatcct ctaaaatcta gactgcacta |
| 241981 | attatttttt ttttttctca gagcaattaa aagtaactta agtggggggt aggtgggtag |
| 242041 | taacatatca gacttggatt ttgaggtaat caacagactg tagacgggca agatggctgt |
| 242101 | gaggagatca aggaagaatc tttcgatatg actaggttag agactaaggt tggaagagct |
| 242161 | aaatttacct ggcaggaatt ttctatatct aaatattggc tgccaaacta atagattaaa |
| 242221 | ggatgagcca ttgagttagg ttagaacttc acaatgcatt aaattatagt caataattta |
| 242281 | aacacatagc accaaatcat aaatctaata catctgtggt gacaagtaga ttatgtaaat |
| 242341 | ctacattcat ttttttccaa gtagctgcaa tatattcttt acattttaaa ttattttatt |
| 242401 | tgttcaaaaa ctccttttta aatacataat accaaggcat ctcccagtat aggctgtgtc |
| 242461 | cagatgacca cacacgtctc gtttcatgta tgaattcaca aagcttcact ctgaatattt |
| 242521 | taaagaacca gcagcaaatt tataactcca gaagtcaacc agccaacaaa accctctaat |
| 242581 | atgcttttaa tctcctcctt gcgaaatgaa agaagacaac ttttttttct ttgtggaaag |
| 242641 | aaattataca taaaagctca ttttatagca ctgagactgt ctcattttgt taagagtttt |
| 242701 | atgcaattag acagtaggaa aaattaaaga gtttttccag tttcagtgtc tctcagacac |
| 242761 | ttctttggtg ttttgattca ttaaatccca acataagatt attattgcca cgttactgtc |
| 242821 | ttggatgatt tactctattt tattaaaatg ggtagcagag agcagaagaa taaaaaaagt |
| 242881 | tggtgtacat gacaatttaa aggagcttat tctaactgag gattgctaat gattaccaga |
| 242941 | agcaattttt ttttgttcat tcaatcactc cacaaatata aattgaagtc agatgttggg |
| 243001 | aatacaaaga caactaacat atattccctg cccacaggga cattatgatc taattggata |
| 243061 | tgcaaacaaa caattgccat gcaaaatgac aatctgaggc tgatgtacat atgtcttagg |
| 243121 | cacttgggaa cataatggaa taagggttca gtgtccgggt taactggcat tcagatactg |
| 243181 | gactcttgag agagcccagt aaagagaacc tctatttccc atgtgagttc tgaataattt |
| 243241 | gtttaaaaag aagaggcaga tgggcaaaaa atttttccac attcattatt aatggaaatc |
| 243301 | gaattggagg aacaatccgg aattcttagc caaatggtct tgctgattta gaaccccaaa |
| 243361 | ttagccattt tacctctagg gcaacttatt tcctagaaga agaaagatat gtttgggctg |
| 243421 | ggccagccca gttaattctt tcccagttta ccaacagaaa tcactatgcc tttcctggtg |
| 243481 | tgcagtgagt atagggacag agaaaagctg aggcatattg catcaagtga agctccgtgc |
| 243541 | ctctgaagga aatgctgaga gaaaggaagg ggcattcatt acccctatca caactggctg |
| 243601 | tggttgagag gtcaacaaag gctttacaag tatcttgaac cagctttaaa gaaagagtag |
| 243661 | gaatagagca ggctctagaa tggggcaggc aattgggaag cgaattccaa gcagagagat |
| 243721 | cggcatgcac aaaggcatgg aggcatgaga tagtgctatg ctctcaacac ccaagagtga |
| 243781 | ttcagcaaag ttcatattta gggagaaagg agggcagcaa gaggtgagcc tgtcatacta |
| 243841 | aaaaaaaaaa aaaaaattca aaaaagagcc tgatcaggga gagaatttca ttatgctcaa |
| 243901 | gtcagacttt atcctatagg cagcggagcg cacctgagat aggaggaagg agcaggtttg |
| 243961 | gggaattttc ttgaatgtgc tatgttcatg cttcctatga gacatgcaag tggagtgaga |
| 244021 | tgtgtaatgg cattgggcat agggtctaga attcccactg ttagtgtcag tcgtgggcca |
| 244081 | tggcacaaaa ggcaaatgga agtactttct atagaagcca gaagagttaa aaatgcagtg |
| 244141 | tagcataatg acaaaaacta ggcatgagat tccaacaaac ctgggtttga atcctgccac |
| 244201 | atacgaccta tgagatatta gacaatcatc ctgaaccttg tagttgccat gtataaaaca |
| 244261 | gcagtattaa tacctagcta ccaggcttgt ataaaaaata catgagatta tgtgtgtaaa |
| 244321 | gtattagcac atctcggctg ggcgtggtgg ctcacacctg taatcccagc actttgggag |
| 244381 | gccgaggtgg gtggatcaca aggtcaggag atcgagacca tcctggctaa catggtgaaa |
| 244441 | ccccgtctct actaaaaata caaaaaatta gcbgggcgtg gtggcgggtg cctgtagtcc |
| 244501 | cagctactcg ggaggctgag tcagaagaat ggcatgaacc caggaggcgg agcttgcagt |
| 244561 | gagccgaaat tgcgccactg cactccagcc tgggtgacac ggtgagactc tgtctcaaaa |
| 244621 | aaaaaaaaaa aaaagtatta gcatggctct ggcacatagt agattcttct ttaaatgcct |
| 244681 | cttcaggata cttagctcat gaaaattccc atttgttgga gggacaagga aacagaagga |
| 244741 | aggaacttgt agccagagca agaaagtgga agtggggcag cagccatgtc ccctgtgtag |
| 244801 | gcaggaggca gggggacaag agtaccaatg caaggatgga gggatggata cccaaaggaa |
| 244861 | ctgcctcatt cacagctgct tgaggggcag agatcactgt ctacagtcct taacacaact |
| 244921 | tgattccctc tgctgaaaat tagatctgcc taggctcagc tcagcttcct ctttgtactc |
| 244981 | cacactgtct ctgttaagaa ccatagagca cctgtttcat gtctatgaat ctgggttgga |
| 245041 | gcaaaaggaa aataaaataa aaaaaactca gagatgagca aagtattagg cagaagccta |
| 245101 | atgggtctgg ctggagagga ggagtgtggc catgcgctgc tgtcagcatg cagctcacaa |
| 245161 | ggcccgggct ggctgctgtt cttgtgacgt tagttgaggt ttattctggg cataattagc |
| 245221 | cttttcactc cttgtttctt tcctgtgttg cgtcctactc catgaaatgt tgagtgccag |
| 245281 | tccttgtctt tcatccacac ttgaaacctt cgttcatgct aaggtgtaaa taaccagcaa |
| 245341 | caactcagag aaaagtagaa atacacccag acttgaatct tgcagtgtca cctcccctca |
| 245401 | cataccctca gcagatatgc ttaaaaaatt atatcttcct ttcctaccag ttttacttta |
| 245461 | tacattcttt caaaataatg gtctggcagc tattacaaat taaaaagagt tactaagaat |
| 245521 | gaagaaattc aatgatcatc ctggggatag agtgttatct ttcatggtga acatttcttg |
| 245581 | gtaatcatga gaaacaccaa agggatgcag ttttaatata atttcaggca acaaataatt |
| 245641 | atgaaggaga tgttttgcat gcagagcctt ttggggacct ctgaaatcct gtctcctaat |
| 245701 | ccatctatgt atattgggca aatagtaagt tctcaataag tgttagttag aaaagtaaat |
| 245761 | gcatgaattg agtcctggta accataataa aaacagtctt tcttgtggaa atgtgttggt |
| 245821 | gattatggac tggaccagct gcagcaatca aacagaaatt agagtcttaa tagacaacac |
| 245881 | acgagcatgg caccccagag ttggacagaa attttctgtg ctcactggga acttggctct |
| 245941 | gactctggtt tctctgtcac agattttggg gtgggagagt gctcccatgg ggaaagcagc |
| 246001 | acgtgctgat atcgaaattg aatagaacct tggctgggct aggagtcatt gctattttag |
| 246061 | tcacttccag atgtctgctg ctgtagtttt aagggacagg gaaagatgag tggagtgtgg |
| 246121 | catgccactg ggtaaaagat gaggagcgtt ctccttctaa gcccttcaag ttgtatttaa |
| 246181 | agccatccct caatatgcta caaagatgga ttggataaag cctttaaaaa ctgtgttctt |
| 246241 | ctattcacaa tagcaaagac ttggaaccaa cccaaatgcc catcaatgat agactggata |
| 246301 | aagaaaatgt ggcacatata caccatggca tactatgtag ccataaaaaa ggatgggttc |
| 246361 | atgtcctttg cagggacatg gatgaagctg gaaaccatca ttctcagcaa actaacacag |
| 246421 | gaacagaaaa ccaaacacca catgttctca ctcataagtg ggagttgaac aatgagaacg |
| 246481 | catggacaca aggaagggaa catcacacac tggggcctgt tggggggttg ggggctaggg |
| 246541 | gagggatagc attagaagga atacctaatg tagtgacagg ttgatgggtg cagcaaacca |
| 246601 | ccatggcata tgtataccta tgtaacaaac ctgcacattc tgcacatgta ccccagaact |
| 246661 | taaagtataa taaaaagtta attaattaaa aataaataaa caaaaactgt gctttttaac |
| 246721 | attcatttat agatttgact tcatatatat caaataggca aactgcagaa acctttgtga |
| 246781 | actaatcatg actctgcctg ccccaactag aaaaacaaaa caacacaaaa caaaacaaaa |
| 246841 | ccagaaccat tcttgggctt tggttatgat ctagtattta tgaagtgcca gccattaaac |
| 246901 | atatgttgaa tggtacctat gccagatgag ctggctgccc ccagtagcta ttgtgctaac |
| 246961 | ctaacaagct caccagatgc ttgttctata tctgctttct ccttttatga tattttcggt |
| 247021 | gtgtctttta atcccaaaat tgtcattatg aattagataa aagatatcag gtggggggtg |
| 247081 | accccctctg aaatattctc aaaagggatg cctggggttc tttccaagag gccctgtcac |
| 247141 | caccagggac cagtctaggg tatagatcaa agtctgtgat gggttcatag agtttcttgt |
| 247201 | ttctttcctt tctttcactg agaaggtatg gcactagcat gatataactc ttgctggata |
| 247261 | aagaaagcac aggagaagca gtatagtgca gtggttaagc atataggatt tggattagac |
| 247321 | tcaggtcaag ttcagacact gtcactcatt agtcatgtga acttggacaa attacttaac |
| 247381 | ctctctaagg ctcagtttct tcatctgtaa aataggtata gtgatagcag ctattgaatt |
| 247441 | tttgtgtgtg caggagaggg gaaaattatg gtaaataata attcctccct tgtccaacaa |
| 247501 | gattgtgagc tcaccggaaa tataacaaag ggtaagacca gtgaaggtca acatgccgcc |
| 247561 | tttattattg ttaaagctga cataaaagaa tgtagtgtct ttatggacaa gtgaacttca |
| 247621 | cagccagacc tctctgccag gacaggcctc tccttgcagg agcagagcac agcatgttcc |
| 247681 | ctctcaagag aaggaagaga tgtccgcatg tctccatcca tgctctactg tcaaatcagt |
| 247741 | cacttttccc cgaggctaga gtgaggcagt ggagggtggc tgggagtgtt atgttaatgg |
| 247801 | gtcttcactt ggaagggaac gtcaagagtt ggagatacga ttaccctagt agcagcaact |
| 247861 | tcatagtgtt ctcctgagga ttctgtgaga taaaataagg tgtttggcaa gtgctaaatg |
| 247921 | ttcacgaaat gtatacggtg atgttacttg tcacagcaac cattatcact gagtgtcaca |
| 247981 | tctgtggcaa ggaaataggg caatgaaaaa cagagacatt tggaagttgt ggtgttgtcc |
| 248041 | catgagggtt aaataaagag ttcaggatat aatctttaaa ccaaacaaga gattaagtgt |
| 248101 | ctatacttag catgttctgt tattgtcacc ctgggacaga ggaacaagca tgaaggttta |
| 248161 | agacatgata gaaggagatt ggatttaaca caagtgggaa gaagcagaga tcttaactag |
| 248221 | ataaatgtga aacaagaaga tgtcatgcac ctgggagctg ggagatcctc ccaagcatat |
| 248281 | tctcctggga tgaagatttc tgggtcttgg ggagttggtc aatccatgtc ttatcttaga |
| 248341 | catgagatta gctcacccac tccctctgct tgaggtttct actagctgtt tatccccaaa |
| 248401 | tgttctgttg gatggcatcc tagtcagggt tctccagaga aatataacca gtagaagata |
| 248461 | tgtatacaca catacacaca tatacatata tatatatata aaatttatta tatcaatcta |
| 248521 | gtatttatat aataaattta ttttgattta tcattattat tacttaaatt tattatataa |
| 248581 | atctttatat atatatatat gcatataaaa tttgttgggt tttttttttt ttttttgaga |
| 248641 | cggggtctca ctttgtcacc taggctgcag tgcaatggtg tgatcttggg acactgcaac |
| 248701 | ctccacctcc tgggttctag caattctcct gcctcagcct cccaaagtgc tagaattaca |
| 248761 | ggtgtgagtc accatgtctg gctgatatat ataatttata agttaatata aataatagat |
| 248821 | ttactacaga tataaaagga gattcatttt gaggaatagg ctcacacaac catggaggct |
| 248881 | gagaaatctt ctaacctgac atctgcaagc tggagatcca gagaaaccag tgctgtaatt |
| 248941 | cagtctgaat ctgaaggcct gagaaccagg ggagccaatg gtgtgaatcc cactctgagg |
| 249001 | gcaggaggag atgagatgtc ccagctcaag cagtgagtga ggcaggagaa aaaggagcaa |
| 249061 | atccctcctt cttccttttg ttcttcctct ttttgtcctc agtggattaa atgatgtcca |
| 249121 | gccatgctgg ggagggcaat ctactttact gagtccacct atttaactgc tcatcttatc |
| 249181 | cagggacacc ctcccgggca tacccagaaa cagtgtttga tatggacacc ccatggccca |
| 249241 | ctcaagttgg cacatacaat taaacatcac aagttggctt tattttttct taaactgaaa |
| 249301 | aatgcagata caggcctgtg tggcccaggg aaacccagac ctttggtatt tacctgtgat |
| 249361 | tcattccgtg cagtcccgag ttaagcacac aagttcctct gagattattt ggagatttta |
| 249421 | ttttgttcta gttcttaaag agtacaatat ttaagaaaat ttgccccata ttttgaaagc |
| 249481 | aatagttttt cagatctctg ttggcctctg atttgagtta ggcatgatgt ttgtttaagg |
| 249541 | caattttcta aattacttct cttaattctt cctctaggaa ttagcatcta cgacatttct |
| 249601 | actttctttt ccacacctcc actctccccc acttcacttc ccttcttcag ctgtgagtgt |
| 249661 | caaagtccct gggttcgtat aaatgatgtc aaaggcaacc aattgggttt tctaagattc |
| 249721 | agggttgact cacctgatct caagaggaag ccccatattg acaagtgatt atcttctcat |
| 249781 | ttcacaaaac atagttattg tcagagagaa gtaagagggg agcbggggag tggatagctg |
| 249841 | tagtgataca gtaacagtgc ttcaatgctg aaagtgaaaa acacagtgaa tgtgaggaag |
| 249901 | agaaaaggtg catattataa aggaagcagc atcagaatat gccaatgttc tgagaataaa |
| 249961 | gagggagtta ttcaggtggc tttgagagag ggtgatttca accctggcag ataattttta |
| 250021 | ggaacgagaa tctaatgcac aagtaaacat gcttgttata tgggaatgct gtgatagtct |
| 250081 | tgatgaatgg gaagtgtgca gatgagttcc aatgtcatcc cacctgctct ttgatatttg |
| 250141 | tgaagtgaga gctgagacat aacctctgtg gtttaagaag aactgatcta attatggtca |
| 250201 | ggtgattgga aatggaaatc tgccacagca ctttgaggaa gcatttttca gatccccatc |
| 250261 | ccctagtatt aagcaaactc ttaaaatcgt aaatctaatg ataccacgaa atgtgttttg |
| 250321 | atgtttaaat caaagggcat ttcacggtaa tggctccaca gctgagcaag cctgtatttg |
| 250381 | cttaaaaatt ttatctattt agaagtcact gattttcaaa taaactgaaa agctgccaat |
| 250441 | caacatggca gctgaaacat tcactttatg gagcaaaaca atagggctca tgtcagagct |
| 250501 | gtgacccaag tttgaaaatt aatgtcattt tgttatttct cttaagagtt gatcttttcc |
| 250561 | tttgagttgc tcttcacgac aactgctaag tggctttgtt gttggatttc agggtttggc |
| 250621 | acaatattcc gttctctttt atggctatta tgacaataaa cgaacaattg gatggatgaa |
| 250681 | tttcaggttg ccgctctcct attttctagt ggggattatg tgcattggat acagctttct |
| 250741 | ggttgtcctc aaagcgtaag tttcatttgt cttttgggaa gcaaataatg atttctggaa |
| 250801 | tcaaatggag ggattaattt ggggattgga tataattttg ttgctatttt atgtctaaag |
| 250861 | gaaacagagt ctgtaagaga tgaaatgtag ttttaatacc aacactaatg ttagactatt |
| 250921 | acatcttcaa aagaactgaa cataaacaca ggcctttgag tcatctcatg gggtcagacc |
| 250981 | aatgcttgca tgcctatctt gtgtttaaac atatttttta aatgtgtatt tttgtacttg |
| 251041 | aaggtgtgaa ttaatgttgc cagcaagaca ggaaaacagc tgcbggtctc tcttttgcgt |
| 251101 | gcagagaggt ttgtaacttg cagaatcagc tcaataggca gaatctattg ttctctgctc |
| 251161 | attttttaaa aaaaccagaa taatcactca ttcaaaaaat tttagctgtg taagacagca |
| 251221 | aaaatgaatg gtccccaatg aaaccatcac aatcaactgt ataatcatgg tttgtcttgg |
| 251281 | gaaaagattt attggagtat ggggaagaat ttcactggag aactgatatt actgcagttc |
| 251341 | atttttctcc ctgcctaaaa ttatttataa tactccactt aaagactgca gaagcctagc |
| 251401 | agagttattt gggtttatat attaaaaaaa tgacccttta gccaattttt tttgaactag |
| 251461 | tttacgagaa gagttgaaac atctcaagta aggttgccat tcttttattt gactatgtgc |
| 251521 | aagttgaatg agcttttccc ctcattgtag gaggtccctc agcctgaggg tctaagaggg |
| 251581 | gaaaagtgca aagtcaccct aagcaggagc tctctgaagc agtctgtgac acactttgtg |
| 251641 | tcctaaacct gcctcactta cttgttcctc cagagaaaac tgccatattt catttttaag |
| 251701 | ctcttttagg acttaaaacc ttataggaaa tcctatatct aagatattta tcaacctgct |
| 251761 | aaagtgtaat cagagacctc aaatataaga gactgtccat cagataaact actatcacat |
| 251821 | tccaaaaatc gaagatattt tctagtcttt tgactatatt gctctggttg ggctgaagtc |
| 251881 | agaggtatca tttacattac tgaggcctca tgagtatcat ttctgtgttg ctcctttagt |
| 251941 | ttctgtggtc agtggagaag aatagtttct catgtctgat gactcagctt ttattccggt |
| 252001 | aactgtgcag gctgtgtacc ccacagccat tctgcctagg ttcaaatccc agctctacca |
| 252061 | tgtatgtatt tatacaatca ttaacagatg gctcaactgc tttgttctcc tgtttcccct |
| 252121 | tggtaataga ggtgtaatgg atgtgaggac taaatgaatt aatacaaaca aagcacttag |
| 252181 | aatatgcctg gatgagaaaa ttattcaaca aatgttaaca attttattag gctatatttt |
| 252241 | attaggctat attatatttt attagcctat aattcatagg cttatttaag aaaaaaagcc |
| 252301 | agcatggtag gagttgaggc cacattatag atccccaaaa caaggcagtc atgtatggtt |
| 252361 | atgcagttgt acatcagtag atttgtatat ttaataaatg attttctggc agatgaattt |
| 252421 | aaagtatcta gagcagcatt gtgccaggca agccacatat ataagtttaa aacttctagt |
| 252481 | agtcattaaa taaatagaca ggtacattta attttaataa taaatatatt tgctttaact |
| 252541 | caatatatca aaagtattat cattttaacg aacaatcaat ataaaattat tattgagata |
| 252601 | ttctctgcct ttcgaaaggt atcaagtctt tgaaatctgg tgtgtatttt ataccagtcg |
| 252661 | catttcaatt gttcagtagc cagatgttgc tggtggaaca ctctgttggg tagagtggct |
| 252721 | ctagaggaag tagtggcttt ttcaaagttg ctcgaagatg ccatttggga tagctgcagg |
| 252781 | gcatcaaatc cacattttcc ccctcaaagt cattcatgtt atatcatcca aaccagtgtg |
| 252841 | gccttgaacc ttccctctgg catggacctt tggctgctcc ttacctggtt aacaagtagt |
| 252901 | tcaaactcat tgcccaaaca gcaagacaac tcaaaaacaa tacaccactc tcactccacc |
| 252961 | accagcccat gggagaatat tcagtagaaa aagaattgat gagatataaa tctttgtaca |
| 253021 | gaatcattaa tcatctcttc ctactcctat cccagtcaaa tattctcttg gaataagttt |
| 253081 | gagcggattt atgacataca ttactcaaat ggaatagaag gtaacctaag ttctaaaatc |
| 253141 | gactaggcta catcaagatt ttttcactgt actcattctg ttagcgtctg catactcatc |
| 253201 | cacaaaatgg gagcaaatat ctatttttag ttacttaata gcaaaatcag aaaataaaaa |
| 253261 | gatagaaatc caagaaaata gtttgaaatt ttaagataag atgactaact ttgttggccc |
| 253321 | aggattctcc tggttttaga actgaaagtc ttgcatttga gaacctttca gtccccaaca |
| 253381 | aacatggatg gttggtcacc ttggttttaa gtccttccct tttcttcttc ctcccttcat |
| 253441 | tcatttcttt tatccttttt ttttttcctt ttctttccag gtcagtgtac attttcaacc |
| 253501 | acatcatatg cttagaaatc ttcatgataa atatagttac ataagtatta aaagcaaatt |
| 253561 | aaaacagtat aacataaagt tacacaacat ggaaaccatc agctcattta aatattgtcc |
| 253621 | tcattagttt gaagttttat atcataaaat aaaggtggct tgacatcaga acccaactgt |
| 253681 | tcccgttaaa aacaattctc taagctaaaa atttggggtt ttactggtct attttacagc |
| 253741 | agctaaacta ctggaagcag ttgaatcatt ttgagaatgc atgtcttaat aagaaactca |
| 253801 | tagctatttt atccttgtag gctttttcaa gactttttcc tgtttgtagg atgttttagt |
| 253861 | ccatttcgtg ttgctataaa ggaatacctg aggcttggta atttgtaaag aaaagaggtt |
| 253921 | tatttggctc acagtctaca gactgtacaa gaagcatgga gtcagcttct gcatcaagtg |
| 253981 | agtgattcag ctgtttccac tcctggtgga aggcaaaggg gaaccagcat gtgcagagat |
| 254041 | cacgatggtg agataggaag caaaagagag atggggaggt gcbgggctct tttaaacagc |
| 254101 | cagctctcgt gggagctaat agaataagaa ctcacttact atcccctgca aaagaaggca |
| 254161 | ttaatctgtt cataaagaat cttcccctat gacccaaaca cctttcatta ggctctacct |
| 254221 | ccaacattga gatcaaatct ctacatgaca tttggggaga caaacagcga aaactcagca |
| 254281 | cagggctccc tgggattaga tataattttt ctgtttatga tcctggctat aataatactc |
| 254341 | atagaatgga ctaacaaata ttcttggata cttaaatcat gtgctatacg taacccttaa |
| 254401 | atggtgtcaa aatttttgtc tacatagact ataatataga ttatatatat atgagatata |
| 254461 | tattataaac tacatatatc acaaaccaac ctcaacacat gcagataaat atttttaaat |
| 254521 | ttggcaaaat gacagtatgt tcatccatat ttctggagct gcaacaataa ttataaatta |
| 254581 | tacttgaaat aataataatt aacatctgtt gagcatctct catgaatcag tttaaattac |
| 254641 | attacttcta atccctaaac attgcaaagt agctattagt tttataattt tacagataat |
| 254701 | gaaataaaac tcagagatcc taaatgaact gcacaaggtc atttgactat aagacctctt |
| 254761 | tgaatttaga gttttctagt tcaaaagata tcttctaccc cttacacctt gccacctctc |
| 254821 | tgtactgtgc ttctccttac gtaggccaag gtgttcctcc caccaatctt atatactgtg |
| 254881 | ttgagtaccc attagttatt cctattggat ggatggagaa attaaggctc agcagagttt |
| 254941 | gaggatttca ctaagttcaa atgcccagta atttgcataa ctgaactttg aacaccttgc |
| 255001 | tttaatttca gcacttagct tttctaattt ctgatgtgga ttcatctata ttgatgataa |
| 255061 | caatcatcaa tatagactga tgtctctgtc tcgtcctggg tagccttttt atttttaaaa |
| 255121 | attctgtatt aaaatagttt cttgtctgtt gttaaattcc cttagagttt tatggccttg |
| 255181 | atgtgactca tgtgaccaaa cgttttgtta aaaaaaaaat taaacttatc aaaaccaagt |
| 255241 | ccttgttcta caagactctt gcatattcca agataaatca tggccagctt cacacacacc |
| 255301 | atttctaaat caacgagact ttattttctt ccttctactt agatgtcagt gcctttgtcc |
| 255361 | attttctttt cacttctttg gtacatgttt acccagacag ttatgaccta cctgatactc |
| 255421 | tgcctaaata tcttccatgt ctcttgacat ccttaatttc ttaacattga aattgtttct |
| 255481 | ttttcctccc cattttccca cccccaatta atttttttct ttgtcgaagg aatttctcct |
| 255541 | tatctattta gtagaaagca gtcagagtgc ctcatagacc ccagtctaat attttacttc |
| 255601 | tcagagatat tttcattgga gatcataatg tttgatgtat gtaatgatga atttcagacc |
| 255661 | ctagagaaag ttatggaagg gtaagtggac ctggcctaca gggcatgata ttctggcaaa |
| 255721 | tcccacaaaa catatggtta tctcatcttc ctcaaactat agttgacctt atttcaaaaa |
| 255781 | tgcttggagc agaaaagcaa cgaggtatga aagacatgaa gtcaccacct tccattttat |
| 255841 | attactactc tatgaattgc atctagattt taaaactcaa cataaaaaac tgtcttcttg |
| 255901 | caagcatgga ctaataagga tagtagtagt tcacaaagaa tggcagctat ttacaaagtg |
| 255961 | aggtgatatt gtcaaaacct atcataatga caaagacaga actaaacagt gatagaataa |
| 256021 | caagcatatg tggtatgcat ttattatatg tattgtgcca tgcaaaaaag caatttatgc |
| 256081 | tgtatgtatt tacttggtga ggctctttcc agtgctaagt ttacttctag aatgacaatt |
| 256141 | catgtattca ttcatttgat tactatttgt ggaacaccta gaatgggtaa tctaagagaa |
| 256201 | ctatccagta cctgggtatt tcatggtgag caaaataaag tccttgcctc tgtggtgctc |
| 256261 | agttggggaa atattgtaaa caaagaaatg accagtggtt ttggccaatg tagtataatt |
| 256321 | ttatgttgtt gttatcctct gcagtcaaat atttgctaca gcttcttcat cctcaagaat |
| 256381 | tttaaatagt tgagaagagc caagatggct aacaagatgc agccaggaag agcttctccc |
| 256441 | aatgagaaac cagggtatta agaagattgg cacactccaa gtagatcttc agaagggagg |
| 256501 | cattgagagt ggatggagga aggatgtaga ctctgtgctg aagttagagg aagcttggaa |
| 256561 | tgctatgctc aggaatgagt tctaggactc attcctggct ccgagtgtct cctaaggaag |
| 256621 | ggagagttaa ataggcgtgg agtagcccac tctcaccatg gacctccata attctagctg |
| 256681 | caggagtctc aatgaccccc atggatattt gaactgatag ggggagctgc ttgaagagtt |
| 256741 | gacagggaca ggactgcaga ctgtgtggag ttcagaggat ttggcaaagg aaggactgca |
| 256801 | gtagagcaca gccaaggaca cccatccctg aagactcacc atgcccctgt aggctttggc |
| 256861 | ctttgttgac tgtcagacca atacagagca gggctgtctt gcccatggaa tgaggccatt |
| 256921 | ctgatctgag tgcctccctt gtctgccagc ctttcctgag gttcatgcca ggctgtgccc |
| 256981 | acttgcagca caggcttgga tgtccaactg gggcacttcc taaaggccat catcatagct |
| 257041 | tctttgttgg cagaccccac ccaactgttg gagagcttct gaagacaagc ctccacccgc |
| 257101 | acacaaccac ctgcagcctc ccccctctgc tttgccaaca cgcaggtatg catggaccct |
| 257161 | gctgctctgc tgccaccaac acatgagcac agaccccact gccactgccc cgacaaagca |
| 257221 | ctgttgccag caaccctcat ggagcattgt tgttaacaga ctggaaacac ctcagctcct |
| 257281 | tcagcacagc aggtgtttaa ccttgagagg ccagagaaca aagcbgtgtg cctggtccta |
| 257341 | taccactggg ttacagcaca cagtccagga gtgctgagct gagcccaggt cccctgaaat |
| 257401 | cagccagaaa tgaagccagt tgactagacc taacttatat cacagtcaaa acctcaaagg |
| 257461 | catcaaagaa ttgcaacttt aaagattaaa gaaacatcag ctcacacaga tgagaaaaaa |
| 257521 | ccagcaaaag aactggggca actcaaaaag ccggagtgtg ttctcacttc caaatgacca |
| 257581 | tgctagctcc ccagcaatgg ttcttaatca gactgagatg gctgaaatga cagacataga |
| 257641 | attcagagtc tggatggcaa tgaagattgt tgagatttag taggaagtta aaacccaata |
| 257701 | cgatgaacct aagaatccag taaaacaata caagagctga aagacaaaat agtcatttta |
| 257761 | agaaccaagc tgatctgata gagctgaaaa ccccattaca ataatttcat aatacaattg |
| 257821 | gaagtatcag gagcagaaca gcccaagctg aggaaagaat ctcagagctc aaaagtggtt |
| 257881 | cttcaaattg actcagtcag acaagaataa aaaagaaaga ataaaaagga atgaacaaag |
| 257941 | cctccaagaa atacagaatt atgtaaaaag accaatccta tgactcactg acatccctga |
| 258001 | aagagagggg gagagagaaa gcaagttaga caacatattt gagggtactg cctatgaaaa |
| 258061 | tttccccatc ctcactagag aggtcaacat tcagattcag aaaattcaga gaacccctgc |
| 258121 | aagatcctat aaaagatgac catccccaag acacatagcc cacagattct ttaaggtcaa |
| 258181 | tgcaaaagaa aaaatattaa aggcagctgg agagaaggga aagacatcta taaaaagaac |
| 258241 | ccatcacact aatggcagac ctttcagcag aagcagtaca accaagaaga gattagggcc |
| 258301 | tatattcacc atcctaaaag aaaagaaatt tcaactaaga atttcatatc gagcctaact |
| 258361 | aagcttcata agcaaaggag aaataaaatc cttttcagac atgcaaatgc taaaggaatt |
| 258421 | cattactatc acacttgcct tacaagaggt ccttaaggaa gtgctaacat ggaaataaaa |
| 258481 | aactgttacc aactaccaca aaaacacaca taagtacata gaccactgac actataaagc |
| 258541 | aactacacaa tcaagtccac ataacaacca actaacaaca ctatgacagg atcaaatctt |
| 258601 | cacatatgaa tattaacctt aaatgtaaac gggctaaatg ccacattcaa aaggcacaga |
| 258661 | atggcaagtt ggatcaagaa gcaagaacca actgtatgtt gtcttcaagg gacccatctc |
| 258721 | acatgcagtg acacccacag gctcaaaata aagagattga taaaaatcca tcaagccata |
| 258781 | aagagattga taaaaatcta tcaagccata aagaaattga taaaaatcta tcaagcaaac |
| 258841 | agaaaacaaa aagagaagag cctgttattt ttattttaaa ccaaacagac tttaacctaa |
| 258901 | caataatcaa aaagggacaa agaagaggat tacataaaga taaaagattc aattcagcaa |
| 258961 | gaagacttaa ctgtcctaaa tgtatatgta cccaacactg gaacacccag gttcataaaa |
| 259021 | taagttcttg acccacaaaa agacttagat aactacacaa taatagcaag agagttctgc |
| 259081 | accttactga cagtattaga cagattattg aggcagaaaa ctaacaaagg tatttgggac |
| 259141 | ctgaactcaa cacatgacca aatggaccta acagacatct acagaacact ccacccaaca |
| 259201 | acaacagaat atacattctt cttatctgca aatgacacaa actataaaat caaccacatg |
| 259261 | ctcactcata aagcaattct cagcaaatta agaaaaactg aagtcacacc aacaacattc |
| 259321 | ttggatcaca gtgcaataaa aatagaaatc aataccaaga ggatctctaa aaatcacatg |
| 259381 | attacatgga aattaaatag cctgctcctg aatgactttt gggtaaacaa tgaaattaag |
| 259441 | gcaaaaatta agaaattatt tgaaactagt gagaacaaag acatgacata ccagaatctt |
| 259501 | tgggacccag ttaaagcagt ttaaaaggga agttatagca ctaaacaccc acatcaaaaa |
| 259561 | gttagaaaga tctcaaatta acaacttaac atcacatgta gagaaaccag agaaacaaga |
| 259621 | gcacaccaac cccaaagcta gcagaagata agaaataacc aaaatcagac ctgaactgaa |
| 259681 | tgaaattgag acacaaaaag ccatacaaaa ggtacataaa tccaagagtt gtctatttga |
| 259741 | aagtataaat aagattgata gaccactagc tagattaata aagaaaaaag aagattcaaa |
| 259801 | taaacacaat cagaaatgac aaaagggaca ttaccaacaa ctcaaaagaa acacaaaaaa |
| 259861 | ccctcagaga ttattacaaa cacctctatg cacacaaact agaacactta gaagaaatgg |
| 259921 | ataaattcct gaaaacatat aacctcccaa gattgaacca ggaagaaatt gaaaccctga |
| 259981 | acagaccaat aacaaattct agaattgaat cagtaataaa aagcctatca accagaaaaa |
| 260041 | gtcctggacc agacaaattc acagccaaat tctaccagat gtataaagaa gagttggtgc |
| 260101 | caatcctact gaaactattt caaaaacttg aggaggaggg atgcctcttt aactcattcc |
| 260161 | atgagaccag catcattctg ataccaaatc ctggcagaga cacaatgaga aaataaaact |
| 260221 | tcaggccaat atccttgata aacatacatg caaaaatcct caacaaaata atagcaaacc |
| 260281 | aaatccacca gcactcccaa aagtaattta ccatgatcaa gtaggcttta ttcctgggat |
| 260341 | gcaaggttgg ttcaacatac acaaataaat aaatgtgatt tatcacataa acagaatgaa |
| 260401 | aaacagaaac tacgtgatca tctcaataga cgcagaaaag gctttggata aaattcaaca |
| 260461 | tcctttcatg ttaaaaactc tgaacaaact aggcattgaa ggaacatacc tcaaaataat |
| 260521 | gagccatcta tgttaaactc acagccaaca tcatactgaa caggcaaaag ctggaagcat |
| 260581 | tatccttgag aactggaaca agacaaggat acccaccctc actattctta ttcaacatag |
| 260641 | tacgggaagt cctagccaga gcaattaggc aagagaaaga aataaaaggc acgcaaatag |
| 260701 | gaagagagga agtcaaacta tctctctttg tggacaatat aattctaaac ctagaaaacc |
| 260761 | acatagtctc tgcccaaagg ttcctagatc tgataaataa cttctgcaaa gtttcagaat |
| 260821 | aaaaaaccaa tgtacatttc tatacagcaa tattgtccaa gccaaaccag gaatgcaatt |
| 260881 | tcattcataa tagccacaaa aagaatataa tatctaggaa tatagctaac cagggaggtg |
| 260941 | aaagatctct acaatgagaa ttacagaaca tagcttaaag aaatcagaaa tgacacaaac |
| 261001 | aaatggaaaa attccatgct catagatggg aagaattaat attgttaaaa tggccatatt |
| 261061 | acccaaaaca ctttacagat tcaatgctat tcctatcaaa atacaaataa cagtttttag |
| 261121 | agttagaaga aactatttaa cattcatatg gaacccaaac accctgaata tccaaagcta |
| 261181 | tcacaagcta aaaattaaaa aaaatttaaa aagctggagg catcagaatc acactacctg |
| 261241 | acttcagact atgctacaag gctacagtaa ctaaaatctc atgatactga tagaaaaaca |
| 261301 | ggcacataga ccgtattagt cagggctctc tagagagaca gaactaatag gagatatata |
| 261361 | tatatatatg ggagcttatt agggagaaag gctcacatga tcacaaggtg aagtttcgtg |
| 261421 | ttaggccgtc tgcaagctga ggaaggaaga agccaagagt ggctcagtct gagtccaaaa |
| 261481 | gcctctaaaa cagggaaacc gacagtgtag ccttcaatct gtggctgaag gcctgagagc |
| 261541 | ccctggcaaa ccactggtgt aagtcccaga gtccagatgc tgaagaacct ggagtctgat |
| 261601 | atccaagagc aggaggatga aaggaagcat ctagtacagc aaaaagatga aagccagaag |
| 261661 | actcagcaag ccagcttacc ccactttctt ccacctcctt tgttttagcc actgtggcag |
| 261721 | ctgattagat gatgcccacc cacattaagg gtgggtcttc ccctcccagt ccactgactc |
| 261781 | aactgtcagt ctcctctggc aacaccttca cagacacacc aagaaacaat attttaccag |
| 261841 | ctatctaggc atccttcaat ccaatcaagt tgacacctaa tattaaccac cacatagacc |
| 261901 | aatggaataa gttagagaat ctagaaataa agctgcacat gtacaagaac ctgatttttg |
| 261961 | acaaagttaa caaaaacaag caatggggaa aggactccct gggtcataca cagcattgga |
| 262021 | ataactggat agccctatcc agaagatcaa agctggactc tttcctttca ccagatacaa |
| 262081 | aaatcaactc aaggtgggtt aaagacttaa atgtaaaatc gaaaactata aatttttagt |
| 262141 | ttttaaaact aatctataaa aactcttgaa gaaatcctag gaaatactat tctggatatc |
| 262201 | ggccctggca aatccttcat taagaagact ccaaaagcaa ttgcaataaa aaccaaaatt |
| 262261 | gataggtggg acctaattaa actaaagaac ttctgcacag caaaagaatt tatcaacaga |
| 262321 | ctaaacagac aaccaacaga atgagaaaaa tatttgcaaa ctatgcatcc aagaaaagtc |
| 262381 | taatatccag aatctataag gaacttaaac taaccagcaa aaacaaaaca aaacaaaacc |
| 262441 | ctaaaaaacc attaaaatgg gcaaaagaca tgaacagaca cttctcaaaa gaaggcacac |
| 262501 | acggccatta agcatataaa gaattactca acattactaa tcattagaga aatgcaaagt |
| 262561 | aaagccacaa tgagatacta tctcacacca gtcaaaatga ctattgttaa aaacaaacaa |
| 262621 | acaaacaaac aaacaaaaaa cagatgctgg catgactgtg gagaaaaggg aacacttaga |
| 262681 | tgctgttggt gggaatgtaa attagttcag ccactgtggc aagcaatttg aaaatttctc |
| 262741 | aaagaactca aaacagaact accatttagc caagcaatcc aattactggg taaatatcaa |
| 262801 | aggagtagaa atcattgtac tataaagaca catgtactca tatgttcacc acagcactat |
| 262861 | tcaaaacagc aaaaacatgg catcaaccta gatgtccgtc aacagtgtac tggatgaaga |
| 262921 | aaatgtagta tatatacacc atgcaatgct atgcagccat aaaaaagaat taaattatgt |
| 262981 | ctttgcagca acattgatga agctggaggc cattatccta agtgaattaa tgcaggaaca |
| 263041 | gaaaaccaaa taacctcata ttctcacttg taaatggaag ctaaacattg agtacacatg |
| 263101 | gatgcaaaga agagaacaat agacaccagg gcctatgtga gggtggagag tgggagcaag |
| 263161 | gtgaggattg aaaaactacc tattggttac tacgctcatc atctgagtaa tgaaataatt |
| 263221 | gatacaccaa acccccacaa catgcaattt acccatgtaa gcaacctgca catgcattcc |
| 263281 | ctgaacctaa aataaaaatt agaaagaaaa aaataataat taaaaaaatt atctggggga |
| 263341 | aaaataattt acattagtag caccctcttg tcttcagggg atatgttcta agacccccag |
| 263401 | tggatgccta aaactaagga tagcaaattc tattgcbgtc agttggaaca tgtttctttt |
| 263461 | catgtcttca gtccacatat ttaatgactt ttccacttta actaaatttt aatcacacac |
| 263521 | tgtgaccatc acttttacag tttgaggtac aacagcaaaa ctatcattaa tttctttttt |
| 263581 | cttcttcaca atttcatgga tagaagattt gttcttactg tagatcttag caacctcagt |
| 263641 | gtatgatttt cttttccttc cttattaggt caaaaacttt tgccttttca cttaaaggaa |
| 263701 | gcactttaag tcttatctgt ggcatatctg aattgccagc atcactgctc ttgcactttg |
| 263761 | agagtattac atgaaataag ggttacttga acccaagcat tgccttactg taatagtaag |
| 263821 | tctgataact gagaggacta ttaacaacat gggtatacta ttgtatccac aggatgcatc |
| 263881 | cacactaaac aaagggagaa ttcacatcct gggcagggtg aagtgggaag gtgaggaatt |
| 263941 | tcatcacagt actcgaaaca tcataaaact taaaacatga attgtttatt tctagaattt |
| 264001 | tccatttaat atttttggaa ccatgaattg atcacaagta actaaaacca tggaaaagag |
| 264061 | agaactagtc cacatgttgt ttagtatcgc tattacagta attttctttt tcttgtgtgg |
| 264121 | tcttatcctg tgggcttcta gaaaattgtt tcctacctgc ctctcaatcc ccttcctctt |
| 264181 | ctcaactttc attttagcag aggctacatt atagtgaccc tgttggttta ggatttaaag |
| 264241 | aggcatttat ttgatttgtt aaaaacctcc acatgcaccc atgaaataac caaatgacct |
| 264301 | cagggtataa atggagctgc aaacttgtcc aagtcaagaa attcagtata aaaaccttag |
| 264361 | gcaggccagg cgcggtggct cacgcctgta atcctagcac tttgggaggc cgaggtgggt |
| 264421 | ggatcacgag gcagaatatc gagacaatcc tggctaacat ggtgaaacct cgtctctact |
| 264481 | aaaaatacaa aaaattagcc aggcatggtg gcgggcgcct gtagtcccag ctactcagga |
| 264541 | ggctgaggca ggagaatggc gtgatcccgg gaggcggagc ttgcattgag ccgagatcgc |
| 264601 | gccactgcac tctagcctgg gcgacagaga agactcctcc tcaaacaaaa acaaaacaaa |
| 264661 | aacaaaaaca aaacaaacaa aaagaaacac cttaggcaac aacatatatg ctagaattgc |
| 264721 | ctttgctaac tcccctggca aagcaaatga tgtattgaga ttgcttctca gataaggtgg |
| 264781 | ttgaaaatga tagcaatctt aaaaaatgag cagttttcat aaatttgtat acattttgct |
| 264841 | ctatagacaa agagtagagc ttatagctat catggccata tctcaataaa aatgtgttgc |
| 264901 | aagcaggttt gccttgggca tctttcctta ttcctttcag tattccactt cttttcacac |
| 264961 | cctttcccac atgttagatg ttcccagtct gctcattcag ttcgggctcc cttccctggg |
| 265021 | aggcbgtctt cagctcaaaa ctttgccagt gataaaactc cattcaaaac ttatctgcca |
| 265081 | agtggccatt tttacttgaa gccctgccct tggtcaatga cagtgcaaaa actggatagt |
| 265141 | ggcatattaa tcaaataagt cattttctcc ctaggttaaa ccatagggaa tatctgcttt |
| 265201 | caaccctttt ggcctccaaa aaaaaaaaaa aaagcatttt gtatggcttt tcatacctca |
| 265261 | tggtgtccta gcttgagcac tggagcaaag tcagaaaatc tgagcccttg acttatctct |
| 265321 | gtggttcact gctggataat gtccagaaaa ttatttcatg cctttgagct tcagcttcct |
| 265381 | tatctgtaaa aaggagagta actaccttga cttcttgctg agattttaaa gagaacaaat |
| 265441 | gtgaaagcac acacaatcac catttgcaaa gggtaaagtg gtagatggat gaaaggaata |
| 265501 | atgatctgta atttttcctt acatgctagc ctatttaaaa tgtatgagcc tccatgataa |
| 265561 | gtgtggctaa tagtggggga atgtagatga tctagagata ccggtcaacc tacaatgtca |
| 265621 | gctttatgtc attgtgcccc tttcttcttt ggggtttata tgactataat attttaaaaa |
| 265681 | ccaaaacctt atgggaccat tttataattt gtgtcatatg aaattttaat tttgctattt |
| 265741 | atagtgaaag ggaaaaaagg aagtggagta tataggatat agatctctaa ccactaaaat |
| 265801 | aaacctgtga gtaaatgcat tttaagctct tcatgcaaat acatatatat atatatatac |
| 265861 | acacatatat atacacacac acacatataa ttactgatta aaaatatata taaaatcaca |
| 265921 | tatatataca tataaaacca cttggcattc aggttgtata aaaatgttga tttttattca |
| 265981 | agaattgtag agtagatgga aatttaatgt actcaatgta atctctattt gggatgagat |
| 266041 | tctaggggga attaaaattt acataggagt ttctttgcct ggtttagtcc atccagaggc |
| 266101 | ttcagatggt ctgggaacca actaaagttg tgtggagcaa tgtaaaagtc agtatatatg |
| 266161 | tttcttttcc cctggggagg gattcaatag atttcatcgt attcttaaag aaattcttgt |
| 266221 | cctaccaaag gttaagaact aattatctca gttaaacaaa acacataaaa atatgttttt |
| 266281 | atatacatgt tgaattattc aaatcttcag tgcttagtag tttattaatc ttgaaggcct |
| 266341 | agaaagtgaa taatttcaac aactgaacaa aaataaaatt taaaaagaaa ctattttctg |
| 266401 | gtcattagaa caaacttgtt ataaaatata tgtctttttg ctattgcttc tccacttcaa |
| 266461 | cactcatgat catgttttgt tgctatttcc cctatctcat tttttctggc tgctgggtta |
| 266521 | aacttcctgt ttttgcagaa tgaccaaaaa cattggtgat gatggaggtg gagatgacaa |
| 266581 | cactttcaat ttcagctgga aggtctttac cagcbgggac tacctgatcg gcaatcctga |
| 266641 | aacagcagac aacaaattta attctatcac aatgaacttt aaggtagagg caccaacttc |
| 266701 | aaaaacctgc tgtttgtatt tctaagagta aaattggagg cattccatct ggtccagtag |
| 266761 | tgcagtatct tgacaattta catgaaagat taactcatgg tttctgccta ccaagatctt |
| 266821 | gccatggttc tgattataac tggaaaatct tccatgaccc acaacagcac tattattcct |
| 266881 | taaacacttc tcttctctaa atctggtaat aaaataatgt tactggattg aaataggacc |
| 266941 | atgagtaatc agaataagat attttaaaaa ctagaacaat gttcactaat tatttacagg |
| 267001 | aataagcata atattgaagt gaccctaaaa cattattttg tagttttttt tttaattcac |
| 267061 | tggaatgaag atttttagag tgaagactat cctaatatca gagcaatcac agtttgtttg |
| 267121 | caagaattct tccttctgtc ttacttgcca tcgtttgttg gcaatattca cctggtttgt |
| 267181 | ggaatctcag atttagttta cattgtcatt cctcacattc tgatgattgt aaaaataact |
| 267241 | tttgaggttt tgatactttt aaaatgtagc taagatattc tattttgggt ttttgtttgt |
| 267301 | ttgtttgttt tcatggatac aggaagctat cacagaagaa aaagcagccc aagtagaaga |
| 267361 | aaacgtccac ttgatcagat tcctgaggtt tctggctaac ttcttcgtgt ttctaacact |
| 267421 | tggagggagt ggatacctca tcttttgggc tgtgaagcga tcccaggaat ttgcacagca |
| 267481 | agatcctgac acccttgggt ggtgggaaaa aaatgaagtt cgtctctgca tgctttttat |
| 267541 | gtgcttagaa cctgacattt gtttcttttg tgggttatgt ttctttgatg gaacatttaa |
| 267601 | aaaggccacc ctttacctat cccctatcct gcccttacag ttaaccaacc ctgttgctca |
| 267661 | ttttccattc tattctagtc ttatttctaa atctggactg tctgtttttc attttgtgac |
| 267721 | atgatggaaa gttagagtca gaaaagatat taaaaaacac atagtctaat cattatgttt |
| 267781 | tacagatggg aatgataaat ctcaagagat tgcattatat gtttatggtc acagagttag |
| 267841 | gagaagagtc agggtgagaa cctaggaatc ttgacttcga gtccaaggct cttgctgctt |
| 267901 | tctctgcaaa tccttcatct gtcattaaaa gatcaaattg ttgcctgaac tttttgaagc |
| 267961 | agccatgata aagccactga ttcctatgtt gatctcactg gaaacactca gattgcttct |
| 268021 | ccacctttgg gcatgtctgg gcttccctct gttttcatta gaagcctaac tgcagcatct |
| 268081 | ccatctccat ttcctcctgt cctgtacctt actttctctc cctctaaatg ctattcaaat |
| 268141 | gaagaaggcc agctcttttc caggaattaa acattatgac cgtaatttgc ctttagagta |
| 268201 | tctgcccatt tagtgaatca gagaaaggag gttagacata gatcatttag aatcagaaaa |
| 268261 | tcattggtca tgagttgttg ctagagtctg ttcccgttca taaaatgctt atgtgtatga |
| 268321 | tgtgacgtca ttttgagctt gggcattttc aaagtatgtg cagatttagg ctgtgggaag |
| 268381 | tgtagacttc ccacactgaa acttttgcag aacagtatag atcaaaagaa ttaaaatatg |
| 268441 | tctttataag catagaattt tctaaaaaat cttggacagc aaatgatata atctacttac |
| 268501 | agaaaaaggt tccaaataac attctgagta tttcagaagt ggtaccaata gagacgggac |
| 268561 | tagatatttt aaagacttta atatacagtc atgtcataaa aacttgtaaa atataagtaa |
| 268621 | tttagcagag ggcttttatt tatttaaaat gaaaaatgta ggaacacctc aaagcattta |
| 268681 | ctaagtttgc tttcaaaatg gtctcataat tgtaatagta catagaggta acattatcat |
| 268741 | gcagctttgg tccattattt atattggtta tgtttttgta taaataaacc atattaaagg |
| 268801 | atgggtagtt gattatcaat aaaataacta ttctttgtaa gaacctcttt aacatatatt |
| 268861 | ttagggaccc tctgagtcct aggggccaat gaaggtaata atggagattc atgagtaact |
| 268921 | ttacaaattt gataaaacca aatttaaatt tgccttgcat aagtttgcac aggataagcc |
| 268981 | aaattttctt tacattagtc taaaattata gcatgctgat tttgtattat gtcatgctga |
| 269041 | gatttggatc ctgttggtca tacttatata atgttttaat aaaaatgaca aaaatctaat |
| 269101 | agcaattgtt ttctaaatat agtctggtag ttattataat tattcacacc acgaagtcca |
| 269161 | caggagaaaa taggaaatgt ttagtggtga cagtttgagc cgggtatttg ggaaaggaga |
| 269221 | tagtcaccag agttacctaa aatcggtatt tccctattag aaaattagta catgttttgg |
| 269281 | attcttttta ttgacttcct ttagccaaat aatatcatca taaggttgcc aaacatccag |
| 269341 | gaaataaaaa gcacatgttt cctacttttc atgtttctat tccttcttct ttctctctcc |
| 269401 | cccctctccc cacccctgca ttattctctt gtctctgaaa ttatagccca ttctttcact |
| 269461 | tttgaaactt ttctacgttg gcttccataa cattatgtca tgtgttctcc atttgtttct |
| 269521 | ctgagttcct tctgtttcct ttaataaaac tcattgtatg tgtttatgtt ttcggcctta |
| 269581 | aaagtttaca tttgccaaaa ttcaatattt aggcctaggc ccatctcagg gaattcatcc |
| 269641 | attctaactg attaaactag cccatatgct gatgattgtc agattagaat tttcagtttg |
| 269701 | aacctcctcc tcaagcagat tattttccat ttcttttgga aatcttgttg tgaagtgcat |
| 269761 | caccatatca gaatcagtta ccacatagaa caatatgtgt tctctgtgta gagactgatg |
| 269821 | taaattgcca ccttcactat accaggaaac agactgttac tactggcaca tacacacact |
| 269881 | cagtcacatg cctctcttga gaatgtgaat tgaatatttt ccctgtcatt ttattgagat |
| 269941 | caaattctaa acgtgcataa aatagtcatt tttagtctta aaaaagatca aagaagccta |
| 270001 | gctcagaatc ttccaaaatt ctggcaaaaa gcaataataa ctttaaacac cattaaccta |
| 270061 | gtttctccct tgtgcctcct tgtagatgaa catggttatg tccctcctag ggatgttctg |
| 270121 | tccaacattg tttgacttat ttgctgaatt agaagactac catcctctca tcgctttgaa |
| 270181 | atggctactg ggacgcattt ttgctcttct tttaggcaat ttatacgtat ttattcttgc |
| 270241 | attaatggat gagattaaca acaaggtaag ccttgtttct ggattgtcct tgccataaga |
| 270301 | gtgttgttca attcccagtc tcaagtttgc cagaaatgcc tttgaaatct ctgttgtctt |
| 270361 | cattttagtt tctatctctt tgctttctag attgaagagg agaagctagt aaaggccaat |
| 270421 | attacccttt gggaagccaa tatgatcaag gcctacaatg catcattctc tgaaaatagc |
| 270481 | actggaccac ccttttttgt tcaccctgca gatgtacctc gaggaccttg ctgggaaaca |
| 270541 | atggtgggac aggtaatgcc accaacagaa gtgtatggca attagtagat taaaaaaaga |
| 270601 | gagtcaatat ctcttccata agattggctt ttaaaaaatt gcttattagt aaaaatagct |
| 270661 | aagatttgtt gaatgttgac tgtgtgctgg ctctgaattt catgtatatt atctcacact |
| 270721 | gtttgcaaat ctatcccttg aggtaaatac tatttgtatg tcccctttac agttgcatat |
| 270781 | aaaggaagga tagttgaaaa tggtgcaaag agatgtttac tatctgtatt ataataaagc |
| 270841 | actcgattta gatacaggcc aaagcaaata tttaaatgga actctattta gtgttacttg |
| 270901 | tttgctgtaa aacaaaacaa aacaaaacaa acaaacaaac aaaaacagag tcttgggggt |
| 270961 | ggccaagaca gccaactaga ggcagctagt gtgcatggct ctcatggaga gaaatagagg |
| 271021 | ggttgagtaa atatagcacc ttcaaccgaa acatccaggt acatgcattg gatctaatca |
| 271081 | aggaaacaac ttgacccatg gagagcagag aaaagcaagg cagggtgaca gcccacctgg |
| 271141 | tagtgacatg aagccaaggg atccttctat gcccagggaa gtggtgagtg aatgcacgac |
| 271201 | cttgggaacc catacttctc ccgtggatct ttggaaccct tgtgtcagga gatatcctca |
| 271261 | tgaacccact ccacctgggc cttcagtccg acacacagag ctatgtggag tctcagcaga |
| 271321 | gcagccactt aagcacatgc agagacccgg gagccttaga tacctgggct tttctttttg |
| 271381 | ggcttcctgt caaaagtagc tatacctctg gcaaagcagg aggttagacc cccaaccaca |
| 271441 | ccccttagaa aaggggctga atccagtgac agtctgcagg ccccacttca cagcacctca |
| 271501 | cagaatgaaa cccactggct tggaactcca gccagttacc ggtagaaatg ttgcacctcc |
| 271561 | ctgagacaga gctcctgggg gaaagtgtgg gccatcatct ttgctgtttg gttgacttgg |
| 271621 | ccattccatc attcaggctt cagagagtcc aagccaacca gcggctgaag cagaccctga |
| 271681 | gcacagcata gcbgttctat gaaaatgtgg ctagactact ttttcaaatg ggtctcctat |
| 271741 | ccctttcctc ctcactgggt aggacctcct aactggggtc tccaaccacc tcctacaggt |
| 271801 | gcgtttgggc cagcaacggg tctgtacatt tctgggatgg agcttccaga ggtgggggca |
| 271861 | ggctgccatc tttgctgttt cacagccttc actgttgcta cctccagata ataaaacatc |
| 271921 | tgaggtgacc agggacggat gtggggtccc aatatactgc agcagcccta tgaaaaagtg |
| 271981 | accagacttt tacatgggtg cccatcccca tatcggctca ccagacacat cctccaggcc |
| 272041 | taggcctcca gctaccctct gctagaatta tcgatcaagt agcagctctg taactccctg |
| 272101 | gacaggatcc ccaggggcaa ctgaaagttc ctctgccact acctctgcag tagaactgcc |
| 272161 | cttgctaccc ttggactaac aaaggaacaa agaccctaag cgcctcatcc atacctccaa |
| 272221 | taagctgcag ttgactccag gagagaaggc cagtctgtct ctcacaggtc ctacctaccc |
| 272281 | ccacccccct ccttgtcacc agacagggaa cccccagctc ggacccacaa catagaacat |
| 272341 | ccatcctggg ctaattgcaa ggagtaattg ctgacctgca tctcaatggg gtggagcccc |
| 272401 | caggagataa gcaaaagacc cttggccata accatgccaa ggtatcttcc tctgctgctg |
| 272461 | ccaagttgga gaagaaacat aacgctgaga ttgccccaga gctgaagggg cagcccagga |
| 272521 | gtgccaagcc gtaatctaca gccagctctc aagggggaaa gaaatctaca ctttcagagc |
| 272581 | attgagaggg aacatggctg caactgtgcg gcaacacagg ggagcctcac aaccaagcaa |
| 272641 | gagtctacca actgaccaat atgccgaagt gccacctact ggatcacatt ccccaaagca |
| 272701 | tcaacaccaa aaatatctca ctaacatacc cccctctgaa accaaagaca agtactcagc |
| 272761 | ttcaaataaa gaccctgtgc aaagccttgg cccaatgaaa acttccagga aagatgccta |
| 272821 | ttgactgtat tcaatctaca ttgcagttaa aggaacacct acacactgag atgagaaaga |
| 272881 | accaatgcaa gaactctggt aactcaaatg accagagtat tgtatgtcct ccaaacaacc |
| 272941 | acaccagttc tccaacaaga gttcttaacg aggctgagct agctgaaatg actgaaatag |
| 273001 | aattcagact gtggagagga atgaagatca ttgagattca gaagaatggc aaaacccaat |
| 273061 | ccaaggaaaa taagaatcac aataacacga cactggagct gaaggacaaa gtagctgtta |
| 273121 | taaaaaagaa gctaataggt ctcataaggc tgaataacac aatacaggaa tttcacaatg |
| 273181 | caatcacaag cattaacagt agaataaacc aagctgagga aagaatctta gaacttgaag |
| 273241 | actggctctc tgaaataaga cagtcagata aaaataaagg aaaaagaata aaacgggaag |
| 273301 | aacaaaacct ccaagaagta tgggattatg taaatgccaa agctatgaat cactggcatc |
| 273361 | cctgaaaggg atggggaaaa agcaaacaac ttggaaaaca tattttagga tattatccat |
| 273421 | gaaaacttcc ccaaccttac tagagaggca aatttgctgc cagtctttgc taacagtcaa |
| 273481 | atttaggaaa tacagagaat tcctgcaaga ttctacacag gaagatcatc cccaaaacac |
| 273541 | acaattgtca ggttttctca ggtcaaaatg aaaaaatgtt aaagacagcc agagagaaag |
| 273601 | ggcaggtcac ctacagagag aacaccatta ggctaacagc agatgtctca gctgaaaccc |
| 273661 | tacaagccag aagcagtcag ggtcctatat tcaacattct taaagaaaaa aaatcttcaa |
| 273721 | ccaagaattt catatcaggc caaactaagc ttcctaagca aaggagaaat aagataattt |
| 273781 | ttgggcaagc aaatgttgag ggagtttgtt accaccagac ctgctttaca agacatcttg |
| 273841 | aaaggagcac taaatggagt aaggaaagac tatttgcagc taatacaaaa gcatacttaa |
| 273901 | atacacagac cagtgacact gtaaagcaac catacaaaca agccagcata ataatcagtg |
| 273961 | aacaacacaa tgacaggatt aaatccatac atattaatac taatcttgaa tgtaaatggg |
| 274021 | ctaaatgctc catttaaaag gcacagagta gcaagctgta ttaaaaaaaa agcaagaccc |
| 274081 | aatggtatgc tgtcttcaag agacccatct catgcttaat aacacccaca cgctaaaaat |
| 274141 | aaagggatgg aagaaaatct accaaccaag agaaaacaga aaaaaacatg ggttattgaa |
| 274201 | attaaaattc ccaatttcaa aaaaaaaatg caaaaaacaa aacacacaca tgcacacaca |
| 274261 | aatacacttc aaaccaacaa agataaaaaa aaggcaaaga agggcattac ataatggtaa |
| 274321 | agggttcaat gcaacaagaa gacctaacta tcctaaatat atatgcactc aatacaagag |
| 274381 | tacccagatt cataaagcaa gttcttagag acctacaaag agacataggc taccaccacc |
| 274441 | caataatagc ccaggccctg atgaattcac agctgaattc taccagatgt acaaagaaga |
| 274501 | actggtaaca ttcctactga agctatttca cgaaattgag gaggaggagg aacttcttcc |
| 274561 | cagctcatcc tatgaggcca gtatcattct gctaccaaaa cctggcagag acacaacaaa |
| 274621 | aaaagaaatc ttcaggccaa tatcatgagg cccatcaatt caaaaatctt caacaaaata |
| 274681 | cttgcaaacc gaattcagca gcacatcaaa tggctaatcc accacaatca agtaggcgtc |
| 274741 | atccttggga tggaaggtta gttcaacata tgcaaaacaa taaatgtgat tcatcatgta |
| 274801 | aaaagaaata aagagaaaaa ccacatgatt atctccatag atgcagaaaa agctttcaat |
| 274861 | aaaattcaac acccgttcat gttaaaaact ctcaataaac taggtattga aggaacatac |
| 274921 | ctcaaaataa taagagcctt ctatgacaaa cccacagcca aaatcataat gaacggacaa |
| 274981 | aagctgaaag cattcccctt gaaaaccagc acgagacaag gatgccctct ctcaccactc |
| 275041 | ctattcaaca tagtatttga agttctggcc agggcaatca ggcaagagaa agaaatgaag |
| 275101 | ggtatcaaaa taggaaaaga gggagtcaaa ttatctttgt ttgcagatga catgatccta |
| 275161 | tatctagaaa accccattac cccggcccaa aagcttctta agcggataag caacttcagc |
| 275221 | agtctcagga tatatcaatg tgcaaaattg ctcgcattct tatacaccaa caacaggcaa |
| 275281 | gcagagagcc aaatcatgaa tgaactcaca tctacaattg ctacaaagat aataaaatac |
| 275341 | ttaagaatgc agctaacaag ggaagtgaag gacctcttca tggagaacta caaactactg |
| 275401 | ctcaaggaaa tcagagagga cacacacaaa tgggaaaaca ttcaatgctc atacatggga |
| 275461 | agaatcaatt ttgttaaaat ggccatactg cccaaagtaa tttatagatt caatgctatt |
| 275521 | cccattaaac cacaactgaa attcttcaca gaattagaaa aaaactattt taaaattcct |
| 275581 | atggaaccaa aaaagagctc gtatagccaa gacaatccaa agaaaaaaga ataaagctgg |
| 275641 | aggaatcaca ctacctgact tcaaactata ctacagggcc acagtactca aaacagcatg |
| 275701 | gtactggtgc aagaacagac acatagacca atggaacaga atagataact tagaaataaa |
| 275761 | accacacaac tacaaccatc tgatctttga caaacctgac aaaaacaagc aatggggaaa |
| 275821 | atatttccta tttaataaat gttactggga gaactggtag ccatatgcag aaaattgaaa |
| 275881 | ctggacctct tctttacacc atgtataaaa attaactcaa gatggattaa aggcttaaat |
| 275941 | gtaaaaccca aaactatgaa aactctagga gaaaatctag gcaatatcat tcaggacata |
| 276001 | ggcacaagca aagatttcat gacaaaaatg ccagaagcga ttgcagtgaa agcaaaaatt |
| 276061 | aacaaatggg atctaactaa actaaagagc tccagcacag caaaagaaac tatcatcaga |
| 276121 | gtgaacagac aacctacaga atgggagaac atttttgcaa tctatccatc tgacaaaggt |
| 276181 | ctaatatgca gagtctacaa ggaaattaaa caaatttaca agaaaaaaac tggatcccat |
| 276241 | taaaaagtgg gcaaaggaca tgaacagaca cttctcaaaa gaagacatac atgcggcaaa |
| 276301 | caagcatgtg aaataaaact tcatatcact gatcattaga gaaatgcaaa tcaaaaccac |
| 276361 | aatgggatac cagctctcac cagtcagagt gattagtagt aaaaagtgaa aaaataatat |
| 276421 | gctggcaagg tcgcagagaa aaaggaacat ttatacactg ttagtgggaa tgtaaaatag |
| 276481 | ttcaaccatt gtggaaagca gtatggcgat tcctcaaaga gctaaaagca gaactatcat |
| 276541 | tcaacccagt catcccatta ctgggtatat acccagaggt atataaatca taaagacaca |
| 276601 | ggcatgtgaa tgttcattgc agcactattc acaatagcaa atacacggaa tcaacctaaa |
| 276661 | tgtccatcaa tgacagattg gatagggaaa atgtgatata ccatggaata ttatgcagcc |
| 276721 | ataaaaaaga atgagatcat gtctgttgca gaaaaatgga tctattatcc ttagcaaact |
| 276781 | catgtaggaa caccaaatac tgcatgttct tacttatatg ggagctaaat tatgataact |
| 276841 | catgaacgca aagaaggaaa caacagacac tggggtctac ttgagggtgg agggtgagag |
| 276901 | gagggagaag agcagaaaag ataactattg ggtactgggt ttaatacctg ggtgataaaa |
| 276961 | taatctgtac aacaaactcc catgacacaa atttacctat gtaacaaagc ttcacatgta |
| 277021 | ctactaaacc taaaataaaa gttttttttt aatggataat ttggggagca cacactaaga |
| 277081 | aattttaata atgtcaattt ttgttaaata attttccctt aaaagaaaaa aaatactatt |
| 277141 | ttaagttatt tgttttcatg atgattttgt aaataacccc agcccaagac tagccatacc |
| 277201 | ttaccagaga aaagaaataa tgtttcatat ggctttctat cccttaaggg aaaccaagac |
| 277261 | aaataaaacc aaacaaaacc caagaaaaat ctacttcaga tctcgtattt ttatacaaat |
| 277321 | ccaatttata ttttgaaaag cttttatgat ttcatttagt tagaattgat attcctaacg |
| 277381 | tgcagtccat aaattgattt tggggcttca gattatcatt gagaacagct tttgtcataa |
| 277441 | agcttctgta tgttagacaa cagttgagtt tagcactgaa tgtagtgttt gtgaaattat |
| 277501 | ttgaacaatt ttttactgca ttatttggta agataacata aaaattgaag gactagcatt |
| 277561 | agtcttataa aattcatata atttaaacaa atatgtaaaa atatatctta ggcttcaatc |
| 277621 | agatgctcat caaacttaag ccaatcaaga tttcaactgt gaaagaaaaa aataagataa |
| 277681 | atgtgtaaaa tgctagacat gtatcattaa tgattgagta caaaaattat ggtataattg |
| 277741 | aaaattctat tttattttat ttgttaagct ttcgggaacc agataaatcc cccctttgat |
| 277801 | gatatatgct attaatttga ttttcagaca tgcacatttc atacaactta caggaacata |
| 277861 | ttacatatga aataataaaa tcaaagtcat ctgcacttaa tacaggagtg cttgtgattc |
| 277921 | aggatgtggt agacagaata atggccctct ataacagtac acattctaat ctctggaacg |
| 277981 | ataaatatgt tacatggcaa aatggacttt gcagatgaaa ttaagttaaa gatctcagct |
| 278041 | tgaaagaatt attgtggatt atgtgagcag gcttaatgaa atcataagga tctttataag |
| 278101 | caggagataa agggaaaaag tcagaaaatt gagatgtaac agcagaagca gaggttggaa |
| 278161 | tgatgtgctt taaagatgga ggaaggagat taagagccaa ggaatgcagg tggcctcaga |
| 278221 | aactgaaaaa gaaaggaaac atattctctt cccaagtctg cactttgaat ttagacttct |
| 278281 | gacttccaga actgtaagaa gataaatttg cattgtttta aaccactaca tttatggcaa |
| 278341 | tttgttacag caacaatagg aaatgagtac atcatggtac ttgggtctcc ctgttccatg |
| 278401 | gctttttgaa gtgaagtctg gttgtggtgc ttaacacgag tctgttttat cacaactaag |
| 278461 | ccgctcccta aatcttcagc atacgattca agaaaggaaa atataggaag tacagtttta |
| 278521 | gaaactgaag gaatttgaga cgttctcttc tgcacatcct agaacacagg ttggcctgaa |
| 278581 | agctaagaaa cctgcacttt aacaagcaaa aacatctact gaatgggatt aatagaatta |
| 278641 | gctgtaaaga gtaggatctg ggctggccac ttctggagtg aaggaatgga ttaattagat |
| 278701 | aggaatgcga atgcaatcta ggagaatatt catgtttcag atgcagatgg ttctgcgata |
| 278761 | gtcccacaca tactgactta aaagagaaga aataccattt agttaatcct ccaccttgga |
| 278821 | agcccgtgga ttatgctgct tgtctttttt tttttttaaa cctgtctgta gtgattttcc |
| 278881 | ttgcttcatc atattttctt actgccattt tagttggatt tcccccttat ctttcacctt |
| 278941 | cctttctcca aggaagcatt aagctctagt gggaaagtct gcagaagcgg gccaagggaa |
| 279001 | aaggggttgt ggttctgact ggaatgttga ttaggcagat ggaatctctg ggaacaaaaa |
| 279061 | gaacatatag gacataacaa atctgagtgc tggcaaggtc tggcctttaa gagatcaata |
| 279121 | tctgtatcca tgcatctaaa atttctattc tttaattgct taaaaaatat gcctccaaaa |
| 279181 | atagtaaagg cagctgctct gtatgtaatg ttagatatgc accctcattc attgttctat |
| 279241 | gagagcatta cagatgtttc ctcttctcct ccatggatac cctctgcttt gattttctcc |
| 279301 | aaggatgcta tgagactcaa agcacttatt gttttgaata taggataatg tgattgctcc |
| 279361 | tttacttctg cagattccca agcaatcatt tagtttcatc cccaatggat ttgataggtg |
| 279421 | ggcagcagag ccattcctct ttgaagctat atcctgaggt cttcactttg gggaagggga |
| 279481 | gaaagcaaca gctgaagata aaatggctaa tgtgccaagt atttcctcct caaattttta |
| 279541 | cgtttcattc tgagatacgt tatattatta tttccgtttt atagatgaga agactgagac |
| 279601 | ttaggtaatt tgctcaagat ctctgagaaa gtcaatgaca ggagccccag ttcagcctac |
| 279661 | atagtctgct tacagagttt gtgtctttgt tcacagtgct aaattgtccc ccagttagca |
| 279721 | tcaacacaca ctccccaaac tcctgcctgc aatgtctata tttggtggcc ttttatgatg |
| 279781 | ttccttgcct attgttttcc cttcacctat taataaatta tttctttagc tttattgatc |
| 279841 | aaagctgccc aggcatttta actaacatca cgtgtgcaaa gtttttaggt gtggagtgtg |
| 279901 | gggtttagca ggaggcctgt gtgggggctg tgctccccat cctgacaagc acacaaggaa |
| 279961 | ctaggatgat atccttgaga ttggctgggc taccattgtt tggattctct ttcttttaaa |
| 280021 | atatattttt cctatggtat atgaataaac atttaaaatt tttaatacaa tgtttgaatc |
| 280081 | ttcttcagat attttatgtg aaagttaggt cactgcttgg gaaggaatag aatttcaacc |
| 280141 | tttgggatga ggatgcttaa gaggatgtgg aggacttcca aaccactctg aaatgttttc |
| 280201 | ttacctgagg aagtcttcta gacctggcag tagaaaccta aaaatatccc tcatagcctt |
| 280261 | cctctaattg atgctagtta ttagaatctg agctcaacat tgcctggaaa gggtgggcat |
| 280321 | ggaggcatgt gtctgtagtc ccagctactc aggtggctga gacaggagga ttgcttgagt |
| 280381 | ccaggagttc caggtcagcc tgggcaacat agcaagaccc ctgtctctac atacatacat |
| 280441 | acatacatac atatatacat acatacatac atacatacat acatacaaag aactgcctta |
| 280501 | ggaaaggaaa ggagacaaag agtaggaagg agaaaaatta tgtccaaaaa taaccacagg |
| 280561 | aatactatca ttcattcatt ttttatttat gagtgtacag aaattgctgg gcattgtgtg |
| 280621 | attatataat tggaagtaaa acacttctca gcaaatgcaa aataactgaa atcataacaa |
| 280681 | acagtatctc agacaacaga acaattagat tagaaatcaa aattaagaaa ctcactcaaa |
| 280741 | accacacaac tacatggaaa ttgaacaatt tgctcctgaa cgactcctga gtaaataatg |
| 280801 | gaatgaaggc agaaatcaag atgttccttg aaactaatga gaataaagag accatgtacc |
| 280861 | agaatctctg ggacatactt gaaggaactc ttcaaggaga actacaaacc actgctcagt |
| 280921 | gaaatcagag aggacacaaa catatgtgaa aacattccat gctcatggat aggaaaaatc |
| 280981 | aatattgtga aaacggccat actgcccaaa ataatttata gattcaatgc tatttccatt |
| 281041 | aaaccaccat tgacattctt cacagaatta gaaaaaaaac atttttaaat tcatatggaa |
| 281101 | ccaaaaaaga gtccttataa ctgagaaaat ccaaagcaaa tagaacaaaa caggaggtgt |
| 281161 | cacactacct gacttcaaac catactacaa ggctatagta atcaaaacag catagtactg |
| 281221 | gtgcaaaaac aggcagacag accagtggaa cagaataggg aacacagaaa taagatcaca |
| 281281 | gacctacagt catctgatct ttgacaaact tgacaaaaac aagcaatggg gaaaggattc |
| 281341 | gctatttaat aaatgatgct aagaaaactg gctagcctat gcagaaaatt gaaatgggac |
| 281401 | cccgtctata caccttatac aaaaattaac ttaggatgga ttaaatgctt atatataaaa |
| 281461 | gccaaaacta taaaaaccat agaagaaaat ctaggcaata ccatttagga cataggcatg |
| 281521 | ggcaaagatt tcaagacgaa aacatcaaaa gcaattgcaa caaaaacaaa aattgacaaa |
| 281581 | tgggaactaa ttaaactaaa gagcttctgt acagcaaaag aaactctcat cagagtgaac |
| 281641 | agacaaccta cagaatggga gaaaattttt gcaatctatc catttgacaa agatctaata |
| 281701 | tccagaatct acaaagaact taaacaaatt tacgagaaaa aaacatacaa ccccattaaa |
| 281761 | aagtgggtga aggacatgaa cagacacttc tcaaagaaga gattcacgtg gccaacaacc |
| 281821 | atatgaaaaa acactcaaca tcactgatga ttagagaaat gcaaatcaaa accacaatga |
| 281881 | gataccatct cacaccagtc agaatggtga ttattaaaaa gtcaggaaac aacagatgct |
| 281941 | ggtgaggctg cagagagata ggaaggcttt tacacagtta gtgggaatgt aaattaattc |
| 282001 | aaacattgtg gaagacagtg tggcaattcc ttaaagacct agaaccagaa ataccatttg |
| 282061 | acccagcaat cccattactg ggtacatacc caaaggaaaa taaatcattc tgttacaaag |
| 282121 | atacatgccc acgtatattc attgcagcac tattcacaat agcagagaca tggaatcaat |
| 282181 | ccaaatgcct atcaatgata gactggataa agaaaatgtg ctatatgtac accatagaat |
| 282241 | actacgcagc aataaaaagg aatgagatca tgtcctttgc agagacatgg atggagctga |
| 282301 | aagccattat cctcagcaca ctaacacagg aacagaaaac caaacaccat atgttctcac |
| 282361 | tcataagtga gagctgaaca gtgagaaaac atggacacag ggaggggaac aacacacact |
| 282421 | ggagcctggt cgggggtaag ggagaaatga gaacatcagg aaaaatagct aatgattgca |
| 282481 | ggacttaata attaggtgat ggattgatag gtgcagcaaa ccaccatggc atgtgtttac |
| 282541 | ctatgtaata aaactgcacg tgtaccccag aacttaaaat aaaaaaagaa gacataaaaa |
| 282601 | atttaaaaaa atacacaatt caatggtttc taatatattc acatagttat gcatccagca |
| 282661 | tcacgatagc attttgtttt aggggcttac aatataccat tgtgcagaca tttaatttgt |
| 282721 | tttatttaat tagtctccca agcatattca aatttttccg tttttaatct ggaagaagca |
| 282781 | gtactttcat gattgtatgt atagatttgt gcacatgtgc aaatattgct gtcataggca |
| 282841 | tttctaaaag tggattttct tgatcaagct ccaaacactt taaaatgtga tggatcttaa |
| 282901 | caaatttctt cccaacgttg tgcccggttt aacttcccca tcagtttatg ctcatgctag |
| 282961 | ttcaccacac tcaccaatat gaagaagcat ggattttaca tttgtcattc gtgaggcaac |
| 283021 | aactcattgt tttcatttgt atttttatta tgtggggttt cggtattttt caattttaac |
| 283081 | ggaccgtttg tatatgttct tctgtgaatt tttaatttgt gacttttgct ggtttctttc |
| 283141 | tttattggat tgccaatcta tattcatact gatttgtaaa atcttttaat gtgttagcaa |
| 283201 | tactcaccct ctatcatata cgttgcaagc actttttcca catttgtctt tcaagtctgt |
| 283261 | aaatagtgct attcaccaca taaaatttta aactgctgtg tggccaatat tttcctgttt |
| 283321 | ttggctctcg tatcatgttt atgaaatttc tcagtaagaa gaaaactttt gatttagtaa |
| 283381 | acgggaaata attatttttt aagtaataaa gtcagggtga aatatttttt atttacttga |
| 283441 | tatgactagt tgttttcttc ttttgccatt aattgcagtc ttcaagccaa tacttcttta |
| 283501 | gaaatatgac agatttaata ccaacactag gaccatttga agacagaact gtgtgtttta |
| 283561 | atagagataa tatctcaaca ggagtttgtg aggctgacag tctctgatgt tctgaccacc |
| 283621 | tacgtcacaa tcctcattgg ggactttcta agggcatgtt ttgtgaggtt ttgcaattat |
| 283681 | tgcbggtgct gggacttgga gtatggatat gtaagtatga tgttaatttt gctttttttt |
| 283741 | ttttttaaat ttatttattt tttattgata attcttgggt gtttctcaca gagggggatt |
| 283801 | tggcagggtc ataggacaat agtggaggga aggtcagcag ataaacaagt gaacaaaggt |
| 283861 | ctctggtttt cctaggcaga ggaccctgcg gccttccgca gtgtttgtgt ccctgggtac |
| 283921 | ttgagattag ggagtggtga tgactcttaa ggagcatgct gccttcaagc atctgtttaa |
| 283981 | caaagcacat cttgcaccac ccttaatcca tttaaccctg agtggacaca gcacatgttt |
| 284041 | cagagagcac agggttgggg gcaaggtcac agatcaacag gatcccacgg cagaagaagt |
| 284101 | tttcttagta cagaacaaaa tgaaaagtct cccatgtcta cttctttcta cacagacacg |
| 284161 | gcaaccatcc gatttctcaa tcttttcccc acctttcccg cctttctatt ccacaaagcc |
| 284221 | gccattgtca tccgggccca ttctcaatga gctgttgggc acacctccca gacggggtgg |
| 284281 | tggccgggca gaggggctcc tcacttccca gtaggggcgg ccgggcagag gcgcccctca |
| 284341 | cctcccgggc ggggcggctg gccgggcggg gggctgaccc cccacctccc ctcccggacg |
| 284401 | gggcggctgg ccgggcaggg ggctgaccac cccacctccc tcccggatgg ggcggctggc |
| 284461 | cgggcagagg ggctcctcac ttcccagtag gggcagccgg gcagaggcgc ccctcacctc |
| 284521 | ctggacgggg cggctggccg ggtggggggc tgaccccccc acctccctcc cggacggggc |
| 284581 | ggctggccgg gcggggggct gacgccccca cctccctccc ggacggggtg gctgccgggc |
| 284641 | ggagacgctc ctcagttccc agactgggtg gctgccgggc ggagaggctc ctcatttctc |
| 284701 | agacggggcg gctgccgggc ggaggggctc ctcacttctc agacggggca gttgccgggc |
| 284761 | agagggtctc ctcacttctc agatggggcg gccgggcaga gatgctcctc acctcccaga |
| 284821 | cggggtcgca gccgggcaga ggtgctcctc acatcccaga tgatgggcgg ccgggcagag |
| 284881 | gcgctcctca cttcctagat gtgatggtgg ccgggaagag gtgctcctca cttcctaggt |
| 284941 | gggatggcgg ccgggcggag acgctcctca ctttccagac tgggcagcca ggcagagggg |
| 285001 | ctcctcacat cccagacgat gggcggccag gcagagacgc tcctcacttc ccagacgggg |
| 285061 | tggcagccga gcagaggctg caatctcggc actttgggag gccaaggcag gcggctggga |
| 285121 | ggtggaggtt gtagcgagcc gagatcacgc cactgcactc cagcctgggc accattgagc |
| 285181 | actgagtgaa cgagactccg tctgcaatcc cggcacctcg ggaggctgag gctggcggat |
| 285241 | cacttgcggt ttggggctgg agactggcct ggccaacaca gcgaaacccc gtctccacca |
| 285301 | aaaccagtca ggcgtgtcgg cgcgagcctg caatcgcagg cactcggcat gctcagtcag |
| 285361 | gagaatcagg cagggaggtt gcagtgagcc gagatggcag cagtacagtc cagcttcggc |
| 285421 | tcagcatgag agggagaccg tggaaagaga gggagaggga gaccatgggg agagggagag |
| 285481 | ggagtaattt tgcgcttata aggtttttcc tttgtaattc gtcatttaca cacactatat |
| 285541 | aagagaaagg catcatagag tttagtggat gggatcaccg ttttaggtgc aataaatgaa |
| 285601 | gaccaatgag tacatttata atgcagagaa gttcagactc gagtatcatg gtttacaata |
| 285661 | ttctagtaaa attagcacaa gatagcaaaa gcaatggacc tcaacttgtc agctgaaatg |
| 285721 | ttgaactcag taaatcttgg ccctgtagcc caccttctcc ctataagttt actagcattt |
| 285781 | ctagaagcag ggaaagatgg ctaatatcaa ctgcatattc tatttatgcc tttgaattct |
| 285841 | actaaactcc tggatactat catatgccag tcactgtgca gtagatgggg tggataaaag |
| 285901 | gatttgataa atatggtact tgcttcacaa agttcacagt ctaataagag ctcgaaagag |
| 285961 | acacacacaa gaggctgcag aaggttcaag gaaggcctag tttgctgtca tgcatctggc |
| 286021 | aagtggtgga gctgaattct ggcaggggcg gcttcttttc ctgaaacaat ggctcaggtc |
| 286081 | tctcagaacc acactggtgc tgactccatc accagctttc cttctatggt catcctcagg |
| 286141 | tcccccaaca aagtctgagg gcaacagcac actcatcacc ctgtgattag cacattgcct |
| 286201 | ggtttccact gtcctccttt gagtcaaact ggtctcagtc atcctggaaa atatgacctg |
| 286261 | gggggttggt agtactcatt tgcttaaaat cttccagtgg cttctcaagt acttagaatg |
| 286321 | atttccaaat ccctttctag gccttcagta ccctggatga tctgctcctt ttctttctct |
| 286381 | ctcaagtcat ttgctacctc ttttgctctt gctttgtaa gttcacatgg gcttcttttt |
| 286441 | atgctcaaac atgggctgct ttttatgctc aaacacaaga tggtccttgc atttgtaatt |
| 286501 | gctgtttctc ccgcaagggg tgctgttgcc ctagagctag gaatggctgg tttcttcttg |
| 286561 | tcattaaaga ctcagctatt atgttacctc cttagtgctc ttctctgacc acctattcta |
| 286621 | atgtagccaa tcaggcactg tttatatcaa cacactgttc tgttttcttc ataagatgtg |
| 286681 | catctatttg acattactct tgtaaaatgt actcatggtc tatctccctc tgttagaaag |
| 286741 | aatactctat gaaaatagag gccctgacct ctcttatttg aactgtgtga gtcacgtagc |
| 286801 | aggcagcatg tgttggctgg ctgtttgaat gttgaacctt ctcatttttg caccatcaag |
| 286861 | gcagcactgt ctattgccag aactctgcct ccttcgaagc atgtgcccat ggagtctcag |
| 286921 | tgtttgtaat gtttttgagt tattgagcca gtaatgcttc tctcctcacc agtgagggaa |
| 286981 | tatcctttat agctgatctt ctatctcttt tatctcctgc cctctagtct ctggatgagt |
| 287041 | ccaacagtta ggactgtttt caagatttca ggctagatct gtctggctgt ctgactttga |
| 287101 | gatggtacct tttataaggt cgtctccatc accctcattg aaagtgcctc ctcggactgg |
| 287161 | ccaaaagcag ttaggtaatg ctcttcggtg aacgacagtg aggtaatggc tacagataca |
| 287221 | ggatgctctt gtgttgcttt cccattcttt gctatgaggt attcagctgg cttggtttca |
| 287281 | tttctatttt ccttacctga ttcagctcct ctgaggcaga cataaaaatt gccatttctt |
| 287341 | ccttagacca ttgcttggct tgtacttacc ttttatccct tggctgcctt cttcttaagt |
| 287401 | ggcagaaaat ctgagtgcaa atatgaagtc aatattacat gacctggatg cataaaagct |
| 287461 | gtaattaaat gactgtaatt tattatttat tgactgctga cagtgttcct gggttagtag |
| 287521 | aaagtacagg aaaaaagaca agttcctgtt ttaggtcaca gagaaggaat tttctcccac |
| 287581 | gttacctttg gaaggctcaa aaaagctctg tcagaatcaa aacaagtttt aaaacattaa |
| 287641 | tgatggatga cgaatctttg atgtagatcc cattgtcatt gacttaccaa atggatagct |
| 287701 | tacacgggtg agggcctact aggtgcaagc cattatgaac aaactctgtg ctaggtgata |
| 287761 | aaggaataca gggatgtaga agatgtagac ttacgtagag gttgcaaatt tggcctgcag |
| 287821 | ggtagattca gctaatggat atttttgttt ggtatgccca gtggtggtgt ttgtttttgt |
| 287881 | ttcatttttt atgagctaat attttaaaat gagagctctt acataaaaac acatggattt |
| 287941 | attgtttttc ttgaaaggct ggcaacatta aatctgtatt cccactaggg agaaattggc |
| 288001 | tggagttgag aaaccactgc catctgcagt tgggatattc attctccagt tcctcatact |
| 288061 | cttcaccact cttttctctt acaagctccc gatataaata gagaaatcaa ttgtatggcc |
| 288121 | cttgaagaga aagtgtgtgt gtgtttgtgt gtgtgtgtga gagagagaga gacaggcgtg |
| 288181 | catcagtaga aatgcagaca cagaggagga gacatttgaa ctaagtcttg aagaatgatc |
| 288241 | aggatttcaa gagatgaaag aaagaattcc cggtggaggg acaagtgtaa gacagagcac |
| 288301 | cagagataga tagtgtgggc aatccaggca tagattaaaa aaaaaaaaaa aaaaaactaa |
| 288361 | aatgaggctg ttttagagca gaaaaggcta ataagaatgt ttctctgcta ttctcctaga |
| 288421 | cctgctaatc aataatatgg tttcagaaag tacctgtcat gaagggaagg acaacctgag |
| 288481 | ataggcagag gacatacttg agaattctgt cagaaataaa agataaaatc atggtccttt |
| 288541 | ctactgtatg catgcatgtg catgtataca cacacacaaa gcacatgatt tttttcttct |
| 288601 | gaattccaaa aataatgcca gtttattgta gaaaatttgg aaaatataac aaagctaata |
| 288661 | tgaaagtaaa aatcataggt aatctctgcc actaatgaga ttaattattt ggattgttga |
| 288721 | atcaaatagt gttagataac aagtgctaca tatttatata tagtaacaga tttttataaa |
| 288781 | tatacacata tatacttttg tatacgtata tatgtgtgta aacaggtagt agagtagact |
| 288841 | ggttacttgc ttttatttgt tttacctaac actgatcatt tcccaatgct attaactgtt |
| 288901 | gttttgtaac gtttttaatt tgctttaagt tgaactgtct aattattctt atgataataa |
| 289021 | gtgttgtgat gacatttaat tatatccatg tacataagta tcttcataga taaatcatag |
| 289081 | tggatgtaca aattattttc ttatgataaa tttctctgag ttgaattgct cagtcacagt |
| 289141 | agagggcttt aaaaaagtct attcactttt attacaacag cctctgtaga gactctgcag |
| 289201 | atttcagcat tagattcaga gatctataga atgctaaagt taggtggatt ttgacacaac |
| 289261 | cagttgtaat gcatgtattt aacatatgaa aaattgcatc tgtgaattga aatgaggttc |
| 289321 | ctaagtttat gtagccagag aataataagg acaatgaagt acacttctgg acgaaaatgt |
| 289381 | tatgttaaat gtattgattt ctgtactggc tctatctgag taagcbgggt taaaagggat |
| 289441 | tgtgaatatt tttcaagaca caaatttatg gtcataatgt tatcacaaca aacctatgaa |
| 289501 | gattaactaa ggtggaaaaa ttactggctt ggagcagatt accagaccaa tgtaagttaa |
| 289561 | tgtaatgtaa gttaatgtct ccaaaggctt ctctgagcac agttctcagt gtttcagaag |
| 289621 | agttcatgag gagtagaata gtttgtccct aggaaggatt ttaactgctc taatttaata |
| 289681 | caaagtgtgc cctcttgtaa actttgggtt ttctttggca gttcaatgca gaatatcttt |
| 289741 | atcttcactt cagttttcat tgacaccatt cttactattt accagcaaag caagtaaaga |
| 289801 | atattcaaga agaaatagaa ttagattcag ggcatgatgg ggtaagggaa tgttcaataa |
| 289861 | actcagcatg gtgttcacag ttgtattttt aaggtgatca ttgctcactc gtaagtgaga |
| 289921 | gccgaacagc gatgggagac ttctttaaag tctgatgaag gatgctcagg attatccata |
| 289981 | aataagaggc atataattga ctgactacct tagtggattc ccaatcatat tatattgtat |
| 290041 | tatgtcacat ctcaatgtac tgcttatttt gtatcagaaa ctctacaaaa tactttacat |
| 290101 | gtattattcc atgtgatcgt accagcaatg ctgtgaggtg gtattattgt tcctacttta |
| 290161 | cagtaaactg aggcttagag gatgttaaat aattgctcaa agacacatta atggttagtg |
| 290221 | gtagagttag gcctgaaact cgagtctcat caccttcaaa gccatcaacc aaatttccat |
| 290281 | catgttgaat ttacaccgta atgcttgact ctagaaattt taaaaattct gccaaaactt |
| 290341 | gaataattca tacactaaac ctatggcttt tggaactcaa agtgctcata ggcttaggca |
| 290401 | ggctacctgt ggtagaatgg agttagcaaa tgaactggga tacagaatta gaagatcaac |
| 290461 | tgttctctag ctgggaacgt ggagatatta tatatcagtt cgggaaggta gaatgataaa |
| 290521 | gaatcaggaa gaaatcatca gcatcccata aggggttgag aacatgggaa cagggacaat |
| 290581 | gcagactgta ttttaagtgt tccttgaata tgtggacagg atctgtctgc agttaacagg |
| 290641 | atcctattct caactagggt tgaagtacaa agcctcaagt gctcaatcat cctagcagac |
| 290701 | gaggctagag tttgtcctag atcagtgctt ctggaatttg agcatacatc agaatcccct |
| 290761 | gaggacctgt gaaaacagca tttctgattc agtagatctg aggccaggcc cgagaatgtg |
| 290821 | cttttctgac aagttcccag gtgatgctgc tgactctcgt ctgaggacca cactcaaaag |
| 290881 | ccactgctct ggagccacag cccagactag cttgcagctc taagcagagt gattccagct |
| 290941 | gtgagaaatg ggatttatgt gcagaaggtc aggcaactca ttccacaaca gaattaattc |
| 291001 | tctctgagat cctgaattgc atttcatatt atccacaggt tggcaatctg cctcaaataa |
| 291061 | tgaaacttgc agagagagaa gagatcttcc caggcttttt ctttgtcaag tgagcaccat |
| 291121 | atgtcttccc tctgggtgga tgactgactt agcacatcac aagcaaaggt ccaaaaatta |
| 291181 | aacaacatca tttccaatcc ctcaactatg atggacttta gcccaaatcc acatgggctt |
| 291241 | ttctgatgct ggcccccaac agtcttacca ggaatgagca gtcattagtg agtttattac |
| 291301 | acttagctca ttcaaataat tttatgatct caaagttcaa gagaatctgt ttttttttct |
| 291361 | ttttccctaa ccgtttttta cctttgagct ttttctattt tagagacaaa caaaatatat |
| 291421 | tgcaaattga tttatattta ttaaagtatt gctttaaaaa tttaaaatat aatataacct |
| 291481 | aatgtttata aaagcctacc tctaaaacaa tgagcactga cttttatact acatatgtgt |
| 291541 | agtttttctg ccttctcttt tgttttagtt ttaaagtgag agcttctgtg tttattgcat |
| 291601 | aagttaaatt ccatttctaa ggtgtttaca gagaagcaat tctttcataa ctggttctaa |
| 291661 | ttttcaacca ataacgtatt tttagactag aaagggatct tagaaatgaa ctagttcaga |
| 291721 | ggttggcaaa cttttgctgt aaagggctag atagtaagta ttttagcttt tgcaagccat |
| 291781 | ggtgtctcta ttataactgc taaatgctgt tgttttagta ccagtcatag ataatatata |
| 291841 | aatgaatgaa tatagctgta ttccaataaa atttatttgt taaaacaggt ggcagtccag |
| 291901 | atttggcaca tgggccatag tatgctgacc tttggtctag ttcatttttg atttatgtgt |
| 291961 | caggaaacta agcctaatga gataagtgac ctgcccagct tacctagcta agaaatggta |
| 292021 | gagtgaagtc taaaatgcag gtttgaatcc cagtcaaatg tctgttctac aaatccactt |
| 292081 | ggtccagtat ggccaccctg tatcctttct gtgcatcagg ccaatttata gatcaagggg |
| 292141 | gttgttcctc cagcbgtccc tgctgcaaac acagcaggaa gctagggacc ctagggtgtc |
| 292201 | ctttatgctt ttctagtcaa ctagttataa aatgtctcat ctctaatgac cctcaggagc |
| 292261 | tctatgtgct tgtgagagag tgaagaaaac aggcatttaa aacgttgagt tttctccacg |
| 292321 | ttcagtagtt tggtgggcca cctcatgata ccattctaag gaggcgaagg cttaagattt |
| 292381 | gatttttaaa cagagacaga gaaaggctgt tccaaggcaa cagatgggta cgggccaacc |
| 292441 | gagtaagcat ttttcagatg tgttctgtga tcacacaggg ctccagggga aaagtgctga |
| 292501 | agatcatcca gagcagggca ctcccccaga aggaaaaaga ctcagagtta atgttctcca |
| 292561 | gataagaagc agttcatttt tctccatgaa ggacacattt tttttccatt gatgatttca |
| 292621 | gcacaaaaac tgtcaaccaa acctttttgc ctcttgtgaa cattgccctt ctagaaagtc |
| 292681 | ggcaaactaa cgaaacactt tgtagctgtc cttcaacagt atctagagtg atactgcagt |
| 292741 | tatccaggtc atctttgttc tgtttaatac acaggactct ttattatttc attatgtatc |
| 292801 | atcctatcat tttaccttga gggttaacca ttcctgttat gccatacttg ctcttctttc |
| 292861 | cctgaatctg ttacaaggga gattgtccct atgtttcagt tgaataggag agtaatactg |
| 292921 | ccttttagga aagtgatgaa gttgaggcct ggattcatga gactcttgag gccaagcatt |
| 292981 | tgaaaattga gaatggtttt gttggagttc caaatcagga accaattcta tctttttaca |
| 293041 | aatatatttt tgagttcttg ggtttgggag gaacagaggc tctcttggat catctttgtg |
| 293101 | tgtgtgtgtg tgtgtgtgtg tgtgtgtgtg tgtgtgtgtg tgtgtgttgg ggagggagct |
| 293161 | gttatgggga tatgtgtggt ctgaagcaca cctggagata ataagatctg agcagtgcta |
| 293221 | ggaacctgcc aatgtcttgg tgtctttttc gtggtcttct tggccctctc atttcgtatt |
| 293281 | tactgcattc ttattccctt attaccagtt ggtcagtctc ctctgattct ctatcccaaa |
| 293341 | ttaaataaga gccagtttta ttgcccttgc taattagcat ttactccatt gttagaatct |
| 293401 | cctgttagga tgcctaatgc atcaccagga agcctttaga tgggccaccc tatcacagtt |
| 293461 | aaccacttcc attctattgg ttttttgtgg ctcctctgta caaaaaacag cctagtgttg |
| 293521 | ctgccctgag catgaaggtt aatatccaag acatggagac tggacattga attgagtaac |
| 293581 | ttcttaagct ttttttatat ttcttttgct gtatttactt tatgttaaag ttaattcaca |
| 293641 | ttttcattga aaaaattttt aatatgcaaa acttgaaaaa gaaaaggaaa actatagttc |
| 293701 | atcacccgca tataaagtat gactatcttg ctgattattt tccagtcttt gtgcatagtt |
| 293761 | tcatatagtt gattaatgtg tggctttata ttttttgttt aacattagag cacagttttc |
| 293821 | ctcatgtaca taaatattct ttcaaaatga ttgtaattca ttgcaatata tcatagtata |
| 293881 | aatatactgt atatacataa ctaatgttca acacttagat ggtttcatca ttgcttgtta |
| 293941 | aagtttatca tcacatcaga taattttatt aagacagatt ctagaagttt tcttacagaa |
| 294001 | tcaaaaagaa taagattttt aaagctttta atatgtactg tcaaattgtt tttctgaaag |
| 294061 | gttgctacag tttttactgt caccagcagt gtataaggga gcctgtcttg ctgtactttc |
| 294121 | atagcattgg atgacagcat ttaaaaatga gtctcactgt gtttaaaaaa aaaaaggtgc |
| 294181 | tttctttgtt ttatttatat ctggttactt atcctagtga ttattctgct attgttgctg |
| 294241 | aagggaagta attgaaaccc tagccatgcc tatgcagaac aatttgcctt tcagttttga |
| 294301 | ccatgtgaga cgctaatcca atgaacattg tgtctcctct agccttcata caccgaattc |
| 294361 | gacatcagtg gcaacgtcct cgctctgatc ttcaaccaag gcatgatctg gtaggccagc |
| 294421 | tgttggacag cttatcactt acagaaaagc ctcccaggtt atttttgcat acagcattga |
| 294481 | atcctggtgt tagaggagaa tacaatcggt gtctaactcc atatttactt ttgcaaagtg |
| 294541 | gatgcctgta tatagtttcc ttttctttca tatcttaaat gtcagtcatc aaaggtgtct |
| 294601 | ctctgttttg caaagcactt cttcatcaaa taatgggagt ctgtgttctg gttagcagat |
| 294661 | ttatttgagg actatatttt tatattttgt gacgccagga tctaatatta aaacattaat |
| 294721 | aattacatta ccacatgata agtatgaaat aaattaacat aaggcctttc cgagagaccg |
| 294781 | agtttatttt gttgtcacta ctaaatatat ttaaaatgta acttatagct acttttaaaa |
| 294841 | ataatacctt atcaaatcca atagtttatc gagatgaaac gcatgtttta ggaaggtcga |
| 294901 | gttaaaatat gatcttcatt ttgtaacttg ttttataggg ccatggcaca tcagaattat |
| 294961 | tttttttgat gtgtgaaggg ttgtcatatc ttttatcaaa ttagagcatt ctcactgtaa |
| 295021 | acttgacagg ttaagatgag tcgatacagt agaaatcgtt tttgagttta aaaactgaat |
| 295081 | cacgacatcc gattcatctg gggaccatgt gtcttggaaa tctgtcactt cagatttcca |
| 295141 | gcctacaagc agttacaata aggctacttt atcctgggga catgtgccta agacaatatt |
| 295201 | atgctgccaa ccataccatt gtcctattca caagtgccgg tatagactca gtttttgaac |
| 295261 | aagtttcata tattgtacca atagatctgt cctgaattat taaacctttg ggtgctgaca |
| 295321 | gacaccggac ccctctgcaa atgctaaaac cgtcttgctt ctgtcacaca aagacaactc |
| 295381 | tccagggctc catcgtcctg ccatgggatg actgttaaat tcctgtgcct gactaggtga |
| 295441 | atcaatatgg aaaagatatt ataaaaatat tgtttcctcc tttgtcaggt aggtttaaaa |
| 295501 | atctaatttt tattcccttc ctttctaaat tttccaagta tgactcacat gtccagactc |
| 295561 | actaaggaag gaaatgcatc ctacattttc caagcaggga ggaaagtcaa ggtggcccga |
| 295621 | ggaacgtcta ctgacacaga agtaaaggga gcagcttctg tgggttctga gctttcattt |
| 295681 | cctggagttc aatttgctgt tatggcagaa aatggctaac acggctatgg gagtaatgag |
| 295741 | aaaccactgt tctatcagtg gcttttacac aaagtgtcat aaatccttca ggcctcatgg |
| 295801 | gtaccattca cgcagacata tgctgcacgt cgattgtgtt ctttcagagt taagacaaca |
| 295861 | gattggtcta gaaatttgtt tttattgtca gaaaagctgt tataatggct gtcctgcttg |
| 295921 | gtttcactac tgattttgca actatgttag tccactattg ttcatattga aattcttaaa |
| 295981 | tatctaacat gtttttccag ttctctcgtg ggcagatcca ttatcaaaat ctctgcactg |
| 296041 | tctttttctg tttattaatt cttcagacag tggtcaagct tgcttctggc taatttgaag |
| 296101 | agaatattga gttttttgag catacaaaga tattcacaca ctttccaaag ttccagaagc |
| 296161 | aaactgacca ttattctatt attcaccttc acgtcaatgc ttggcacaaa tattcttttc |
| 296221 | ctaaccctag gaggctgatg agggaggggg atgtcatgta gagggaggtg tggggcaggt |
| 296281 | gtaatgtaaa attagtaggc tgactctgca caaaggtcct cacacacaat cgttccatta |
| 296341 | ttttatgaag catgaggata taatgcctga gcttaaccat tttctacaga aacaattaaa |
| 296401 | aatgtacggg gatgttttat tcaattccat tggcttgtga ctggagatat tgaattactc |
| 296461 | ctttaggaat cgctgagtag tggaggttat ttacgcagat gttgttaaca tcaacattta |
| 296521 | tagataaaat ccattttgct atgatttggt tgaatgatta gtaaccttta tttacgcact |
| 296581 | tattttttga aatacacatg atagtttctg tgctaatatt tttaaatgat gaaagcacag |
| 296641 | aatatcttta tcatagcagg atattgagaa atggcagaga acacacagtg agagagaaaa |
| 296701 | tgagttttgg acattgctcc aacactgctt cactgggtac tctcccgcca ggtttatcac |
| 296761 | ctttttttct tcactttctc agttgatcag atgtgaataa tttacctgac atgtacatgt |
| 296821 | cgctgatgta ataaggagag ttaaataaaa gaagctttca ttttctttga tcttccagga |
| 296881 | agaaaagaat tttataaggc taaagtgtta caatgatttt tactgacaga tgatgggatc |
| 296941 | atgcctgggt aagggactta gtgagccgag ctgattagta atgcatgagt aaagatagga |
| 297001 | tgagcattaa cattcggata ttattatgcc aggacttatt tttctagctt atggctcttg |
| 297061 | agttatttgt ttaaaatgtc tttgtgatac ttattttgaa attttgaaat ttatttatag |
| 297121 | atgtatacac aaataataag catatacata caaacaatgt gcacgtatat aggtacaaat |
| 297181 | atatgtggtt ttaggcaagt ctcgattttg aattacgtgc aaaattatat tttagaattg |
| 297241 | atcaggttat gcagcaatga aacaacctca aaatcgtagc agctcataaa aggaacatgt |
| 297301 | tcaatgtggg gtggaagaag agctttgctc ttagaactta ccttcacttt agagacccag |
| 297361 | actgatggaa taggatccat ctgaaacatt gctatcacac tagcagagaa tgaagagaag |
| 297421 | gaaaaccaca caggactttt aaagtttcta cccagcagta aggacctaat ttctattcat |
| 297481 | actttattgg ccaaaacaag tgatgtcacc acctgatttt taggaagact caaagtgtat |
| 297541 | tacatcaaca tgtattggta ttggggagta taatctagtg ctttgcaatt ctaacccatt |
| 297601 | agctgggact atcacttgct tacttgctca cttttttggc gttccctctc tcttgctgtc |
| 297661 | ctgtaacaaa agtatactgt attgttttaa aatctgtctt ctcattagaa aaaaatagtt |
| 297721 | taacttccta caaagtcttt gttcaattca ttatggtaaa atatcattcg tatctattgt |
| 297781 | ccgaaatctt gtcaacaaga cagcccaaat tgtgacaata ttccactttt caaataaatg |
| 297841 | agttaacttt gggttggcaa aagttcaatt atagtggaaa ctaatttctt catctaaatt |
| 297901 | aaaaatgtct ctataatgaa ccaaatttac gttggattgg ctaaacaact attcagggag |
| 297961 | tacaaaatgc taaacctagc tataaatgtt gagggcttca ttatagatag gacagtttaa |
| 298021 | aagacagggc tccccttaca tttttaaaat aagtgcacat atatcttctt tttgattttg |
| 298081 | aaataataaa ttgctattta tattgattta tggtgctaat gaattttctc atccaagaag |
| 298141 | agtgaaactt attttgttga aataatcaac taagccatca agtaaaagtg accacaccta |
| 298201 | agttgttccc acctaaaagt agtattttaa aatgcttata aaaactcaga tgcacaaagc |
| 298261 | agagaattcc caagacaagc taaagtaaga aagtaaacag ataaactaaa tttaaataaa |
| 298321 | tgtgtggaat tttcatctca aaaacctata agctagttat aaattttcaa taaaacccta |
| 298381 | ttttaggagg cacaaacaca tcattgcaat tggctttaaa acaccatatc acctacaaag |
| 298441 | agaaaatgat caacatcaga aagagaaaat ttattttaat ttttttcttt cattaagcaa |
| 298501 | aaaacttttt tcatttgtac agtcgtggcc cactgcaacc ttgacctcct gtcattaagc |
| 298561 | aaaaactaat tattcatgac agaagtgatt aatgcaaatg tacagttttt ttgagtagaa |
| 298621 | gaagtgactt taagggttaa ttatttttaa caagttatat ttataggtgt attagtcaat |
| 298681 | gatataagtg ttggggaaag tttattttag aattagaaga aagaagtaaa acaattgtaa |
| 298741 | atattgttta ctctgttgta gtttaaattc actaatgata gtaggtatag ttagttacag |
| 298801 | catcctttct atgaaataat tatgatatgc aattcctaca ataatgggga aagtggcaaa |
| 298861 | atgtgtttag aagttggaaa tagataagtg cagtttcttt atgaaaaggg tttgtctggt |
| 298921 | tgaaagtggc agtgtatttt ctgcctttgg aaaagaagca tgatgtcaaa taaacaggtg |
| 298981 | cagtgtgact ttgttatgga gtaaagactc aaaactgagc agagttctgt tttctttcta |
| 299041 | ggatgggctc cttctttgct cccagcctcc caggcatcaa tatccttcga ctccatacat |
| 299101 | ccatgtactt ccagtgctgg gccgttatgt gctgcaatgt tcctgaggcc agggtcttca |
| 299161 | aagcttccag atcaaataac ttctacctgg gcatgctact gctcatcctc ttcctgtcca |
| 299221 | caatgcctgt cttgtacatg atcgtgtccc tcccaccatc ttttgattgt ggtccattca |
| 299281 | ggtctcttgc ttttgaaatt tgactcaggc atcgtgttct ttcgggggtg gaggtgggaa |
| 299341 | tggtcattca ttgtataagc tattttttcc ccccaaacaa tgacattttt ggttggtgga |
| 299401 | aatgagatcc cggctgggcg cagtggctca tgcctgtaat cccagcactt tgggaggctg |
| 299461 | aggcaggcag attacctgag gtcaggagtt cgagacaagc ctggccaaca cggtgaaacc |
| 299521 | tcgtctctac taaaaataca aagaaaaaaa aattagtcgc gtgtggtggt gggtgcctgt |
| 299581 | aatccctgct acttgagagg ctgaggcagg agaatcactt gagctcagga ggcggaggtt |
| 299641 | gcagtgagct gagatggtgc cattgcactc cagcctggag gacaagagca aaactctgtc |
| 299701 | tcaaaaaaaa aaaaaaagaa agaaatgaga tcctttgggt attcaggttc aataggtgac |
| 299761 | atggagattc ttaggcaagt tctgtctatt tcctcatttg ggaatcataa aagagaaaat |
| 299821 | actttatact tttccaggct ctgcctgggt aaaatatgta tggtgaatct gagctgtttc |
| 299881 | catgttagag gatagctaag agcaaggtct gatgacagtg gtctggatgt gagtttgcct |
| 299941 | gactcbgggc cgtcacatcc agacgtggtc agctatcact acttctcttg tgcattacta |
| 300001 | ccttaaaaag agagagagag agacagacag agagagagag aataccccac actttaccta |
| 300061 | ggaaagagaa ttattactaa atactaatga gcataaggag ggccacccaa tttgttatcc |
| 300121 | aaaatatcac atgctagtga aaaaaattaa ggcbgttcca catatatatt ctctcctaat |
| 300181 | tatcattcaa gtcaggaatc gagagtcaca acggctcctt gatccaattt agagatacac |
| 300241 | atttctacag ttctctatga cagagctctc ttctctctat gacacatatc agaaacctaa |
| 300301 | gtccctggga tctggaggat gaagtttctt tccctaaagg gccttagaaa tgaatctact |
| 300361 | acaagttctc ccaagaatct ctgcatgttg attcactggc cagcatgcac ttgagctgtt |
| 300421 | tctccttttc agtgaaggaa atgagactgt aaaaagccat gtgaatgata tgcatgatgc |
| 300481 | tgtaatgccc acatataatt cctccattat gttgtcagac ccaagttatt taattaaagt |
| 300541 | caaaaggttc attgctgaca gactaagtat ataagagaca ttttcactct taacagtagt |
| 300601 | ctgagttatt gctttgctgg aaaacaagaa aatgttaagc cagctgatcg agttaaacta |
| 300661 | gctggacctc tgtctactca gagaactgat gttgagaagc tctgttaatt ccgttgtgtg |
| 300721 | tgtgtgtgtg tgtgtgtgtg tgtgtgtgtg tgtgtgtgtg tttccaagtg ggctgaaata |
| 300781 | aataatgcag acagtgacat ctggagacta aatatgaaat tacagtcttg atgagacatt |
| 300841 | cgtctcaata aattccgaac caatctcaga gtacaaagtt caaggaatat gccattcaaa |
| 300901 | ggctttagtt aattgcaaat tattcacact acttattatc caggataagt ttaggtgtgc |
| 300961 | attaagctat taattggaag ttgatccttc tcagtaaaac atagcaaagg accctagctg |
| 301021 | cctgtaaggg aaaccacaca atgtaaacat ggatctccac agatgcattc agatttacaa |
| 301081 | tacgtcttag acatgaacaa tagttgcaca atttcagctt cttaagccct aactcttctg |
| 301141 | gctttcctaa ttggcaaact taggcaaaat tatggcatgt aaatcactat tttgaaatca |
| 301201 | gggaaattta ttttttattt ttaaaattat ttatttgttt tttaatttcc ataggttatt |
| 301261 | ggggaacaag tagtgtttgg ttacttgagt cagttcttta gggtgatttg tgagaaatca |
| 301321 | gggaatttta aatattttca atggagtact gggaagggtt atctctatgc tatttagatt |
| 301381 | ttttttttca tgtcagtttc ctcactttag agccaaagga tgtttgcatt gtttatttgt |
| 301441 | ctggacttaa aagtttgaaa ggattgtcct gctctagaaa tgaggtgaga atgcttgtat |
| 301501 | gcttgtacta gtgggtgcct catagcttgt catctttatg aaccccaagt tttaggtgat |
| 301561 | ttgcttaacc ttcctggtga aggttgtctg actctatcta gatcctgggc aagcaggaat |
| 301621 | ttaggaaata taaatttgaa ctaggttact ggaggtatca cagtgatggc tagttgctct |
| 301681 | ccagtgtagg gaagttttca ggtaagatgg ctatagtata tttatccatt cagtaaagca |
| 301741 | atttgatgag atattctagc ttgtctggtt ttataagacc tggctagaga gggtaaattt |
| 301801 | tccaagaaat tattccaata ggctagtaag tggatttatc gtaaatagtt gacaatttaa |
| 301861 | agatgtccag atgaaggcaa ttctaattgt tctatagcat ttcctgacac ctgatgtttc |
| 301921 | ctcccatcta tgtcaataat tctgaacaat ttatagttct ctaggttttt atatacatcc |
| 301981 | ctgcttacat tatgacaatt ttatttttca tatattttca tcttactgca aagataatat |
| 302041 | gtgtttatgc tagaaaacct aaacattgta gaaatatttt tacatgaaaa gaaacatggc |
| 302101 | ccataatctt gaaaacctga aataacaact ttttagcatt ttatattctg ttttgccttt |
| 302161 | catgcatgat ttttcataac tgagcttgta ctgacacagg atgtttctca gcctcttcac |
| 302221 | tggactcaca gaggggcacc ctgtctactc ggcctgctgt gcttaacccc ttgtgggagg |
| 302281 | aagcacgtgg gcaagtgagt gcgggatctg gcgagacaca ctgggcactg acacaggagc |
| 302341 | aagctccatg tggggcccgt ggccagacca ggtgtgtcac cttgaggaga atgcaatggt |
| 302401 | gcccaagtgc ctatgaccct aaagccccag agggggtgtt acaatgcttc ctgagttcca |
| 302461 | ccatcctcag cctgatggat ggcagtgtct tagcagctca gttggcccct tgcctcatca |
| 302521 | tgtggggcag ctgccctcca ctggagaggg caaagggcca gtgtgacagt ctttcctggg |
| 302581 | ttcccacaat cggtgggtcc caagctcttg tccagcatcc aagaagaatg aggtcacatg |
| 302641 | gattattgaa ggatggtgaa ggaggagaat tttattgagt aatgaaattg gctctcagca |
| 302701 | gagagggcag ttggagaggg gccaggaagg gcaggtcatc ttccccaaag tcaggttgtc |
| 302761 | tcttctccaa agtcaggccg actcttcccc aaagtcaggc cgtctctccc ctctaccaac |
| 302821 | tgagtctgtg gtctttatag gcacaggatg gaagtgtgtg ctgactggtt tgtgagtatg |
| 302881 | caaaaaaggc taaagtgaag gtgtcactca aaggtagaca cgacagtata gaaacccaac |
| 302941 | taggaaaggg taggtatatg taaaataggt gaagggtggg gatgaatcag aggaaagtgc |
| 303001 | gccaaacagg aagacaagtt ctcaatccgg tctgaggatt taacttggac cttggctttc |
| 303061 | aggctttaaa ctgtctttgg cttggaggtg gcatttcacc aggtacctgc ccctatctgc |
| 303121 | ctaggcattt ggctgcctcc tgttgctatc agtatactag gtgcaggttt tttagtatta |
| 303181 | aaagttaaaa ttatattgtg agactgctat tatattggtc atttgcaatc atgctttatg |
| 303241 | catctatttt tcttaatagt ttagctgact tctagagatt ggggatagag aagtttcctc |
| 303301 | tctgtggatc taggacacag taaagtgctg gtcaataatt tgaatgaatg aatgaataat |
| 303361 | gactgcttat tgtgcactaa gcactagaag agacacaggg ttaagtccat gcattaagca |
| 303421 | ttgattctgg tcctgtggca cttatcaccc agcbgggaag acaggcctcc tcataaactg |
| 303481 | ttctaatcta gagtggcgct atgcctacag caggactatg gatagacaca gacaactgga |
| 303541 | aaacaattct gagaatattg tatgatagca tactttggct aacctggcag gagaaggcat |
| 303601 | tgccagggac atgtagatgc gtccataatt tgtacgtaat taagatatct ggactccttt |
| 303661 | ctttggtaaa agacctgacc tgaaaaaggt acacaggaat ccccagggac ttagcaactt |
| 303721 | tgctttgggt cacactggat gctgagaagg cctttgtgtg tagggataat ttcataaaat |
| 303781 | ttgaatgccc ccactctaac tacgttcatc agctatgacc tgaggtgctg gagaagggag |
| 303841 | gatagatggt cttatctttt ttggtacttt taatttatct gcttatcctg tattccatct |
| 303901 | ggcbggggct gcattggggg gtatgaacaa tttggaatgg tgaaaaataa aacatattgg |
| 303961 | aatagggagt tataatctta tattgcttgt aagcttcatt ccctcttatg tatcataagt |
| 304021 | cttgaaaatt agagtgtaga tctttaattt gtgaagcaaa acttgtacct ctgtagtcca |
| 304081 | atgactactg acaaaatata tggagtcact atgtctgctg gaagatagta ttggttagac |
| 304141 | caggagaaaa aaaccataat ctgggacttg cgtgtcattg ttatttagta gttgaaaatg |
| 304201 | cttaaagatt aaaatacaaa agcaaaacta aacattgtat taaatgttgc accaacattt |
| 304261 | attctgatga tgcatacaat ttggtgaaac ccaacccaaa tctcttctga aaattacatc |
| 304321 | ttttcgtagt acaatcagta tgcatataca gagaaaataa tgatgtaatg aatattttga |
| 304381 | atattatggt acaattctag ctattcctta gtaagtcaag acatcctgtt ctcagttttc |
| 304441 | tagtttatag gagctgatac ttgccttcat ggagcttagc agtggagcta agctggtatt |
| 304501 | cattagggcc tgtccaggag aagaaactga gagggaaaaa acccatgatt cggtgtggtt |
| 304561 | accttaccta ttaacatatc tgatgaagga agtctggtgg aaaatgaggt ggaagctatt |
| 304621 | gcgtggaaag agatattgga ttatatgtgg attttattcc actgggctat tccttgctct |
| 304681 | catttccaag gctaattaaa aatacttagc tcaaagagag tgttctccta caagagcagc |
| 304741 | tgactgagag gcagacttat gagctattta caaaatatat ttcaatcaaa atcttagaaa |
| 304801 | tacagttttt aaaaatcttc tcctaaatat gtggttaatt ttctaactgc tttgactata |
| 304861 | tgtttatact gggatcatat ttctcgtatc ttacccatat attgactaca tgaggtcaaa |
| 304921 | gtgtcagcaa gttgtagcta aacatcagat tcctaccctg aaagaggacc taagcagtaa |
| 304981 | ttgagaaaga tttccagttt tcttgcttta accatggttt ttccatatgt tcttaataaa |
| 305041 | cttatctccc cctttttaat tcccccagtg gcaaaaatag aatgtttgaa gtcattggag |
| 305101 | agaccctgga gcacgatttc ccaagctgga tggcgaagat cttgagacag ctttcaaacc |
| 305161 | ctgggctggt cattgcbgtc attttggtga tggtgtatgt gcttttcctc ctcatagaaa |
| 305221 | gagcctctgt gatgttcttc ctggctgttt ttacatttca gctttttcag ctctctcact |
| 305281 | ctccctaagg gttctgctgt aacctatcca aattcaacac tgattacatg gtggtgagag |
| 305341 | gctaaaattc atgagccata ttctgatcct attggatgta attcacaggc atctgcatct |
| 305401 | gtctttgctt ccccaggatt ataagatttg ttcccaagta accacaataa ttatccataa |
| 305461 | acagctaaag caagggaaac ataaatgcta aatgctaaat ctaatcagta cattgagctt |
| 305521 | ccccccaaca acccggcctc cacctctcgt tccataaagc agatggcaat gaatatacag |
| 305581 | aaataatgat cctctaagtt aatattcccc ttgggggccc tatagactat attttagggg |
| 305641 | caagggcttc aagggtctta aaaatttcac tgtccttgtt gttagagggc cgccaataac |
| 305701 | tgtgtgttca cgataataga atcagaggac cagaggatct tgggaagttc ctgtagtctg |
| 305761 | tcccttcaaa gtcagaagtg atttccaaag gggaacttgt cagatgactt ttgttttcac |
| 305821 | ataactttca ttggcttctg actcttggcc atcacagata aacttagatt ctaagtaaaa |
| 305881 | gtacagattt gcbgtggaag agccaaaagc agcgtccatc tcttcctttc agtccctgag |
| 305941 | tgcctcctac atagaatgtc tggagctgcc acgactctca gtcagtgggt aaatattaaa |
| 306001 | cagccccagg gacactttaa gaacaaagtt gatgcaaagg atttggttca tttaaataaa |
| 306061 | ggtaaaacaa ggaaatctca gggagaaaac tcccagtggt ttgcagtaaa tgagcaggga |
| 306121 | ttgtgaccca gttattgtcg tgatcacaag ccacataaag tagtgagggc aggtttatct |
| 306181 | tcttcaattt tataacctaa gaaattgatt tacacaaaga aagtgatttt ccctagacaa |
| 306241 | gagagagagt aaaatggtca tagaaggacc tgaagcagat cctttcacag taaatccagt |
| 306301 | gctcacttct ttatactgcg aggctttctg tgagggagag ctaataacct gtagggataa |
| 306361 | ttaaacagta aatcagatta ccattatata ttacataacc ttgataatgg ggtgctatta |
| 306421 | agaatctgat agtaaatctc tggcacagat gcattagaaa atgacctact gaatgcagca |
| 306481 | tgtttcacca gatggccttt gaaacaattt tctttctcta catgtccatg atacagtggc |
| 306541 | ttctgagagc atgttaatca gtatcctgtg gcctttgaga gtcaaggccc tttagtggta |
| 306601 | tgaatgaggt gttgtttaaa acacacacac acacacacac acaatgtaaa tgtcagattt |
| 306661 | cgttaccata ttcttacttg attaggagac atgtttattt ttaagtgaag gagtggcatt |
| 306721 | gttcaaatgc cttaatccaa agatttagta atcagtccta agagggttta aaaggaattc |
| 306781 | acactgcctt tgtttcaggt actatttaca cactgactca tttaattccc ataacagctt |
| 306841 | tgagaagctg gcttcattaa tcatactatc aataacacat tgaaattctg ccccaagtca |
| 306901 | agtgactaag tggaactgaa actcatgtct tctccttatt tcctacactc acttgcagca |
| 306961 | ccaaacaggg atcagaatca gtgggaattt cagatgggct gaaagccact tgtccgaggt |
| 307021 | ggtatagacc cagggtcagc acacttttcc taattcgagg gccagaggca aattaggcca |
| 307081 | agaggcaaaa ttgaggctct taattaagta attactaata ataaccgttt aaaagacaga |
| 307141 | aaaaccattc ttaattcatg ggccatacaa aacagtctgg cagtcatctt catcctgcag |
| 307201 | gacctagttt gctttgatct ggacagcctg gaggaaagct ggccccatgc aaatgtcaaa |
| 307261 | tagatgtact gaaaggttga ttgtggctct gaggttctga tttaaaaccc agattttagc |
| 307321 | ttattactga gtatattttt tcaaattctg agatctcatc ttctattttt ggggcccata |
| 307381 | caattggctt agctttttat tacctttaat tagagaattg tactagtatg ttgaatttcc |
| 307441 | cccaatggat tatattaaat caacctggat ggctttcggg tatctaagca gagttcaggt |
| 307501 | tagttctctg caggcagttt cattcctttg gagactagaa aaagatttgt gaggaatact |
| 307561 | tatttaacgt gcattacaag gtagaaaatc atggtggata aatagagaat tccagaactt |
| 307621 | gaaaggactt gtgaaatctt tgagttcatc ttccaaatcc aggaactttt ctaagaaaat |
| 307681 | ccttataata cacaccacac acaaacacac acacacacaa acatttattg agcacctatt |
| 307741 | tcatgccaga tattgccctg catgcattta tgtatgtaat tttagtaaaa ctcccatcac |
| 307801 | tcatgtaaga gataaacaaa ctcagccaaa ccgtatcaat aattgtgttg ctagcaccag |
| 307861 | atggttcata aaggatactg tctttcattt tggggagtag aggaaatgtg ttcaatatcc |
| 307921 | agttatttgc agcaaagagt aatataagtt acctttttta ctgcatttct tctttgtttg |
| 307981 | tttgttcgtt ttgccttaag tgaagataag catatttatt tttacagaat tgtctggcta |
| 308041 | gaatttgccc tttctagaat gtaaatgtca tttaaaatcc aataatattc ctttatacaa |
| 308101 | cgttttcttt ttgagggaga aagaaatgca aacaatacat tctacggaaa aaattccatg |
| 308161 | ttcattatct atgcctatga ggattacatt cttagctgca aaggccaaag gacgaaattt |
| 308221 | aaggcagaaa gtcgttttcc tttttgttcg gcatgttccc taagctgcag taggttttcc |
| 308281 | attctctggg atgccattgc catccattta aaatgctact ttcaattata atttaaactt |
| 308341 | atgtgaatac atttccagga aaaagctaat attaggcagt gtgaaatagc agacagaaca |
| 308401 | ggctgtggat caggagcctt gggccccaac tttccaactt caccccagct tcatccctat |
| 308461 | gtcatcctga atgtatctct ttacctctct ggacctcagc ttttatctat aagacaagag |
| 308521 | atttagagta gaagatagct taatgttcat tcccatgctg atatttcata atttacttaa |
| 308581 | tgtaaattta agaagtatct tggggaactg aaatatacct tacactgtat tttttttctt |
| 308641 | tttaatttag tttggccatc tattatctca atgctactgc caagggccag aaggcagcga |
| 308701 | atctggatct caaaaagaag atgaaaatgg tatgatacaa tttatttcat agaaatatta |
| 308761 | tctttattaa tgtcaagcag tagaaaacac tgagaaatct acttttttcc ccttattttt |
| 308821 | tattgtgtag caagctttgg agaacaaaat gcgaaacaag aaaatggcag ctgcacgagc |
| 308881 | aggttggaga tacgtttatg tttgtaatgt ttgtaatttt tctttttctt tttctttctt |
| 308941 | tttttttttt ttttgctttt tctccattgg atggtgagtg gcattattgc tgtgagcgag |
| 309001 | tcattccaca atccttacct tccacctttt tagcccttct caggcatcac atccagggta |
| 309061 | tttggttgtt ttctagtggg aggaaaaaaa gagaaatgaa aatgtgggca tataaacttg |
| 309121 | gcagtagtga tttttaaaag tgaccttgaa aatgcgcaga aaatgaagaa atcccccata |
| 309181 | tagtcgtcta caaacagcag atacaaatgc agatgctctc ctgcccatgt tgactatttt |
| 309241 | catacatgga aggatatggc aagaagatcc caagagggtc ctctgggctt tccaccactg |
| 309301 | attgccagaa gccctttcta atccattaaa ctttcttttt ttaaaaacct ctttattttt |
| 309361 | taaagtatta gagtaaagcc aacttctagt tgccaaaatt aataatatgc tttgagttcc |
| 309421 | ccacggaaag gtgataccta agacctttag tgaaaatctt ttccaacttt gtccttactc |
| 309481 | ctaactttaa aactctttac attagtagga ctgtttcccc actgtaagta ataaaacact |
| 309541 | caaattggtt taattgagaa agagtaattt attcgaccac acaaatgcag ggaaatggta |
| 309601 | tgtatggctt caggccactt tcttttttct atatatatat atatttttta attatacttt |
| 309661 | aagttctagg gtacatgtgc acaacgtgca ggttagttac atatgtatac atgtgccatg |
| 309721 | ttggtgtgct gcacccatta actcatcatt tacattaggt atatgtccta atgctagccc |
| 309781 | tccctgctcc ccccaccgca cgacaggccc cggtatgtga tgttcccctt cctgtgtcca |
| 309841 | agtgttctca ttgttcaatt tccacctatg agtaagaaca tgcggtgttt ggttttttgt |
| 309901 | ccttgcgata gtttgctgag aatgatggtt tccagcttca tctatgtccc tacaaaggac |
| 309961 | atgaactcat cattttttat ggctgcatag tattccatgg tgtatatgtg ccacattttc |
| 310021 | ttaatccagt ctatcattgt tggacatttg ggttggttcc aagtctttgc tattgtgaat |
| 310081 | agtgccgcaa taaacatacg tgtgcatgtg tctttatagc agcatgattt ataatccttt |
| 310141 | gggtatatac ccaaaggatt ttttttcttt tttgagacct ggtctggctc tgtggcccag |
| 310201 | gctggagggc agtggtatga tctcggctca ctgcagctcc aacttcccag gctgaagtga |
| 310261 | tccttcctcc tcagcctcct gagtagtggg gacagcgcac accaccatgc ctggataatt |
| 310321 | tttaattttt tttttgaagt gaggtcttgc taagttgccc aggctgctct caaagtcttg |
| 310381 | ggctcaggtg atcttctctt tttggcctcc caaagtgttg ggattaaaag catgaaccac |
| 310441 | tgtgcccagc attcagggca ctttttatcc taagtttaga acagagtcag gtctgagccc |
| 310501 | acctctctgt gaatctctga agctaaactc ctttcacatt ggctgacctt tatggcagca |
| 310561 | ggaatggatg cagcaacttc caatgccatg tccttagact gtaaaacttc tttcctagaa |
| 310621 | attcctcaac ctctcctcct ttcagattgg ccccatatgg gtcatgtatc catccttgtg |
| 310681 | ccagtcactg tgtctgagta tggtaagtta ctgaagtcag tcaggaccca tccttgaagc |
| 310741 | tgggattggt ctgttttcct gacacatgtg aaatgcactg gggaggtcac acctacctaa |
| 310801 | gagaaggaga aaaggatgct gggtgtcccc aaacaacaaa tgttcaagac ttggttttgt |
| 310861 | tgccttcttt atgcttagcc ttttttcttt tccctctctc tatctagcat gcataaatgt |
| 310921 | aaagttgaat gcbgggtgct gaattagatg attacagtga tgtacagtta tcagactagt |
| 310981 | ttttaatgaa atttttaatt ttttaaatca atactacatg tgtgcataat ttagagttcc |
| 311041 | atttagaatt tcataattct ataaggctta tcatgaaaaa cagcatcttc ttctgcctcc |
| 311101 | tacaccagtt ttgctctctt ctcctcccct gcactcaaat accctaagac aaacactttc |
| 311161 | aatttgttag ttgattttta gatatttatc tccaaattac ctaattttgt tgtaatttct |
| 311221 | tgacttttta gttttaagta ttatctctta aaattattaa ctacaatgga tataataatt |
| 311281 | ttaatagata atatttaaac gatttttata ctcttgcccc agtctttcta tgcattctac |
| 311341 | ctatgtagtt atattattat tttggttagg ccagtataca ttattatgga cacacagtct |
| 311401 | tcacagctaa gccaagtagt aaactatgat acttgtgcat actttaaaat tttctcagga |
| 311461 | ttcataattc ataatttctc tttttaaaca ttttcttatt tttatatatg tttcagtgat |
| 311521 | gcatttaatt tccaaatctc tgctatttat tgagttatac tctcaatata ttcagacata |
| 311581 | ttgggttatc tgtccatttc atttccttag agaaatcttt cccagaatct tctgcacttc |
| 311641 | tccaatttca actagtgtgt gtctgggata cagctgtcat cctttcattt ttcttcactg |
| 311701 | tcattcaaca ggatctctgt cactttatcc tgttttggat actgtgtttt ccattttccc |
| 311761 | caacttcctc tcttttggtc tgctcacatt ttgccagtaa gaaagggtat gtgagaggca |
| 311821 | aattttctga gaccatgcct atctgaaatt gttcttctct tactctccct tttgactgat |
| 311881 | agtttggggg tcaaaaatac tcatctaatt atattagaaa taatatccct tcaaaatagt |
| 311941 | attttttcag aggtttccca tgccttttag attccacaat tgctcttgag tagtttaaag |
| 312001 | ccattgtgat tcttagtctt tcttgagcaa cttgtatttt tgattatctg tttggttttc |
| 312061 | caatctggaa agttctaggg tctccttatc tgcatgttca gaatttcatg atggtgtatc |
| 312121 | ttgcatggat ctatttttat tccttgtgta ctcatcaatg gacttttgct ctttggttga |
| 312181 | agggaatttt cttgaattgt ttacaaattc tttccatcca ttttctgttt tttttttttt |
| 312241 | catgtagaat ttctaattta tttttcatcc ttaaattccc tttgtctctt tgctttacct |
| 312301 | atgaacattt ccttatcttt aaattttaac atttctcttg gccttttcac ttttgctatc |
| 312361 | ataattttag tttctgcaag ctgttttgtt ctttaattct tcttttttaa acagcatgct |
| 312421 | gtttttgttt aatggctgca atggcttgtt ttgtctttat gagaatatta ataactcttt |
| 312481 | ttgatgtttc tttgcctttg atagtctgtt ttctctaagc tgttttgttc ttctttctcc |
| 312541 | cctgcttggt aattcccctg ctttgtgacc ctcagctcat atttcagggt aggatgcaaa |
| 312601 | ggtgggtttc gaagctttaa gcacatggat ggggcttgtg ggcagatcct cattggggga |
| 312661 | ctctgcctgg gctgccgctg aacccccatg tcagtatttt taggcttctc ctcttaagct |
| 312721 | gatcagattc ctcagaaaaa ttacttccga actcctgccc agagagtaaa gatttgcctg |
| 312781 | gcaaatctgt agcacctgag tgggaaaaac aacacgggtg gggctcagct ttcaacctac |
| 312841 | aaatgctcac ttagccccct ctttttactg cggcactcct tgtggtcttc taacccagaa |
| 312901 | gcatctctgt tttactcttt ttagaaaaaa ttattccagt cttctgccag attaaaggta |
| 312961 | gtgggggttg gggagcaatt attcatttgt accaagtgaa gccgatctca gactctaact |
| 313021 | gctgctgttt cgttttttaa taacccccac ccctttgccc caccaagctt gactgcttct |
| 313081 | taacagctaa aacatcctct ttgtattggt tccttacttc cagaggtacc tgttgctgca |
| 313141 | aattactgaa cgtttcagag attttatgtg taaattatgt tgcttactgt ctttttcctc |
| 313201 | ccctggctta gcttttcagt ttgttagaat tgataagtca ttatcattaa tctgtctgct |
| 313261 | ttccagcttc taaaattttg tcattgatgt ctcttcccct attctccccc tccttgcagg |
| 313321 | tttatgcaac cttctccatc ttcctcccca accccctcaa aatttcttga ctgtcatgtt |
| 313381 | tgtgaaaggg tgaaagttca attcaatgta tttacctccg cagtttaggc aaacctttgt |
| 313441 | atttcctaca ctaggagaac aatggtttta tgtccatctt cactctgttc atcccacagt |
| 313501 | gcttacctga ggtattattt tgaaatagag tctgggatgg agtctacctt agtgagaatt |
| 313561 | tattagaatt gtttagtctc tgcagaagat gaggtggttg aagcacatac atcacatata |
| 313621 | ctagcagtgc ttttgtataa tttaatatta tcaaattagt acttaagaat ggaaaattct |
| 313681 | gacttataag atctaaattc taattaaggc ttattgttat ctttattgtt ttaaatgata |
| 313741 | atataatgct atagcatgct attcatctga tattttttcc ataatgtgta tggccaccca |
| 313801 | gtaaacacct actgaatatc tactgaaaaa tgaggaactc ttttgttgga aaaatataaa |
| 313861 | atattcatca cataagcaat aatgtataaa tgttacaaaa aagtagtaca ttcattctgc |
| 313921 | cttgtttaga atatgtgaag cctttgcaaa ctaagaaaca tggaaatatt ttgaacatta |
| 313981 | aaatggtaaa tattatggga aagtagagca catttggaca atacagattt ctggccacct |
| 314041 | cattcagaac cattaagcac actgaaagct acgtttttat ttgcctcctg ttcatcttct |
| 314101 | ctctctctct ccttgttttt tttttttttt tttttctgtt ttgtgaacag ctgcagctgc |
| 314161 | tggtcgccag taataagtat cctgagagcc cagaaaaggt acactttgcc ttgctgttta |
| 314221 | aaagtaatgc aatatgtgaa cgcccagaga acaagcactg tggaactgct attttcctgt |
| 314281 | tctacccttg atggattttc aaggtcatgc tggccaatta aggcatcatc agtcctacct |
| 314341 | gagcaacaag aatctaaact ttattccaag tcagaaactg tttctgcaga gccactctct |
| 314401 | cccctgctcc atttcgtgac tttttttttt tttttaacaa attgagttta gaagtgagtg |
| 314461 | taatccagca atacagttta ctggtttagt tggtgggtta attaaaaaaa atttgctcat |
| 314521 | atgaactttc attttatatg tttcttttgc c |

### Pejvakin (PJVK)

[0172] The PJVK gene encodes “pejvakin” (PJVK). PJVK is a member of the gasdermin family, and is required for the proper function of auditory pathway neurons. Mutations in PJVK may lead to non-syndromic sensorineural hearing loss. For example, a v.930_931del AC frameshift mutation in PJVK has been associated with deafness (Zhang et al., Acta Otolaryngol 135(3): 211-216, 2015).

[0173] The human PJVK gene is located on chromosome 2q231. It contains 8 exons encompassing ˜17 kilobases (kb) (NCBI Accession No. NG_012186.1). The full-length wildtype PJVK protein expressed from the human PJVK gene is 352 amino acids in length.

[0174] An exemplary human wildtype PJVK protein is or includes the sequence of SEQ ID NO: 51, SEQ ID NO: 53, SEQ ID NO: 55, SEQ ID NO: 57, SEQ ID NO: 59, or SEQ ID NO: 61. Non-limiting examples of nucleic acid encoding a wildtype PJVK protein are or include SEQ ID NO: 52, SEQ ID NO: 54, SEQ ID NO: 56, SEQ ID NO: 58, SEQ ID NO: 60 and SEQ ID NO: 62.

Human PJVK Protein Isoform 1 (NCBI Accession No. NP_001036167.1)
(SEQ ID NO: 51)
MFAAATKSFVKQVGDGGRLVPVPSLSEADKYQPLSLVVKKKRCFLFPRYKFTSTPFTLKDILLGDREISAG
ISSYQLLNYEDESDVSLYGRRGNHIVNDVGINVAGSDSIAVKASFGIVTKHEVEVSTLLKEITTRKINFDH
SLIRQSRSSRKAVLCVVMESIRTTRQCSLSVHAGIRGEAMRFHFMDEQNPKGRDKAIVFPAHTTIAFSVFE
LFIYLDGAFDLCVTSVSKGGFEREETATFALLYRLRNILFERNRRVMDVISRSQLYLDDLFSDYYDKPLSM
TDISLKEGTHIRVNLLNHNIPKGPCILCGMGNFKRETVYGCFQCSVDGQKYVRLHAVPCFDIWHKRMK
Human PJVK Isoform 1 cDNA
(SEQ ID NO: 52)
atgtttgctgctgctaccaagagctttgtcaagcaagttggagatggagggagattagttcctgttccaag
cctcagtgaagctgacaaatatcaacctctaagtctggtggtaaaaaagaagcgatgctttctgtttccta
gatataaatttacttcaacaccttttacactgaaagatattctcctaggagacagagaaatttcagctggt
atttcatcttatcaattactgaattatgaagatgaatcagatgtttcactctatggaaggcgaggtaacca
tattgtaaatgacgttgggattaacgttgctggatcagattccattgcagtgaaagottcatttggtatag
taaccaaacatgaagtggaagtatcaacattactcaaagaaattactacacgaaaaattaactttgaccac
agottgatacgtcagtcaaggagcagcagaaaggcagtattgtgtgtggtcatggagagcatccgaaccac
acgacagtgctcactgtctgtgcatgctggaattcgaggggaagcaatgoggtttcactttatggatgaac
agaatcccaagggaagggacaaagctattgttttcccagcacatacaaccatagotttcagtgtttttgaa
ctottcatatacctggatggtgcctttgacctttgtgtcacttcagtgtcaaaaggaggatttgaaaggga
agaaacggcaacatttgcactgctgtacaggttgagaaatatcctatttgaaagaaatagaagagtgatgg
atgtcatttctcgttcacagotttacttggatgatcttttttctgactactatgacaaacctctcagcatg
actgatatttcactcaaagaagggacccatatccgagttaacttacttaatcacaacattcccaaagggcc
ttgcatactctgtggaatggggaacttcaaaagggagacagtttatgggtgotttcagtgttctgttgatg
gtcagaagtatgtgagacttcatgcagttccttgttttgatatttggcacaagaggatgaaataa
Human PJIVK Protein Isoform 2 (NCBI Accession No. NP_001340704.1)
(SEQ ID NO: 53)
MAFAWDAAPLSFVKQVGDGGRLVPVPSLSEADKYQPLSLVVKKKRCFLFPRYKFTSTPFTLKDILLGDREI
SAGISSYQLLNYEDESDVSLYGRRGNHIVNDVGINVAGSDSIAVKASFGIVTKHEVEVSTLLKEITTRKIN
FDHSLIRQSRSSRKAVLCVVMESIRTTRQCSLSVHAGIRGEAMRFHFMDEQNPKGRDKAIVFPAHTTIAFS
VFELFIYLDGAFDLCVTSVSKGGFEREETATFALLYRLRNILFERNRRVMDVISRSQLYLDDLFSDYYDKP
LSMTDISLKEGTHIRVNLLNHNIPKGPCILCGMGNFKRETVYGCFQCSVDGQKYVRLHAVPCFDIWHKRMK
Human PJVK Isoform 2 cDNA
(SEQ ID NO: 54)
atggcgtttgcctgggatgcagcacctttgagotttgtcaagcaagttggagatggagggagattagttcc
tgttccaagcctcagtgaagctgacaaatatcaacctctaagtctggtggtaaaaaagaagcgatgctttc
tgtttcctagatataaatttacttcaacaccttttacactgaaagatattctcctaggagacagagaaatt
tcagctggtatttcatcttatcaattactgaattatgaagatgaatcagatgtttcactctatggaaggcg
aggtaaccatattgtaaatgacgttgggattaacgttgctggatcagattccattgcagtgaaagcttcat
ttggtatagtaaccaaacatgaagtggaagtatcaacattactcaaagaaattactacacgaaaaattaac
tttgaccacagottgatacgtcagtcaaggagcagcagaaaggcagtattgtgtgtggtcatggagagcat
ccgaaccacacgacagtgctcactgtctgtgcatgctggaattcgaggggaagcaatgcggtttcacttta
tggatgaacagaatcccaagggaagggacaaagctattgttttcccagcacatacaaccatagctttcagt
gtttttgaactcttcatatacctggatggtgcctttgacctttgtgtcacttcagtgtcaaaaggaggatt
tgaaagggaagaaacggcaacatttgcactgctgtacaggttgagaaatatcctatttgaaagaaatagaa
gagtgatggatgtcatttctcgttcacagctttacttggatgatcttttttctgactactatgacaaacct
ctcagcatgactgatatttcactcaaagaagggacccatatccgagttaacttacttaatcacaacattcc
caaagggccttgcatactctgtggaatggggaacttcaaaagggagacagtttatgggtgctttcagtgtt
ctgttgatggtcagaagtatgtgagacttcatgcagttccttgttttgatatttggcacaagaggatgaaa
taa
Human PJVK Protein Isoform 3 (NCBI Accession No. NP_001340705.1)
(SEQ ID NO: 55)
MYVYRLLSITVLMDILLEGLHSQYFTIYELRITPMAKHFSTQSFVKQVGDGGRLVPVPSLSEADKYQPLSL
VVKKKRCFLFPRYKFTSTPFTLKDILLGDREISAGISSYQLLNYEDESDVSLYGRRGNHIVNDVGINVAGS
DSIAVKASFGIVTKHEVEVSTLLKEITTRKINFDHSLIRQSRSSRKAVLCVVMESIRTTRQCSLSVHAGIR
GEAMRFHFMDEQNPKGRDKAIVFPAHTTIAFSVFELFIYLDGAFDRRVMDVISRSQLYLDDLFSDYYDKPL
SMTDISLKEGTHIRVNLLNHNIPKGPCILCGMGNFKRETVYGCFQCSVDGQKYVRLHAVPCFDIWHKRMK
Human PJVK Isoform 3 cDNA
(SEQ ID NO: 56)
atgtatgtatatagattactatccatcactgttttaatggatatcttattggaagggctacatagtcagta
tttcacaatatatgaactccgcataacacctatggcaaaacatttcagcactcagagotttgtcaagcaag
ttggagatggagggagattagttcctgttccaagcctcagtgaagctgacaaatatcaacctctaagtctg
gtggtaaaaaagaagcgatgotttctgtttcctagatataaatttacttcaacaccttttacactgaaaga
tattctcctaggagacagagaaatttcagctggtatttcatcttatcaattactgaattatgaagatgaat
cagatgtttcactctatggaaggcgaggtaaccatattgtaaatgacgttgggattaacgttgctggatca
gattccattgcagtgaaagottcatttggtatagtaaccaaacatgaagtggaagtatcaacattactcaa
agaaattactacacgaaaaattaactttgaccacagottgatacgtcagtcaaggagcagcagaaaggcag
tattgtgtgtggtcatggagagcatccgaaccacacgacagtgctcactgtctgtgcatgctggaattcga
ggggaagcaatgoggtttcactttatggatgaacagaatcccaagggaagggacaaagctattgttttccc
agcacatacaaccatagotttcagtgtttttgaactottcatatacctggatggtgcctttgatagaagag
tgatggatgtcatttctcgttcacagotttacttggatgatcttttttctgactactatgacaaacctctc
agcatgactgatatttcactcaaagaagggacccatatccgagttaacttacttaatcacaacattcccaa
agggccttgcatactctgtggaatggggaacttcaaaagggagacagtttatgggtgotttcagtgttctg
ttgatggtcagaagtatgtgagacttcatgcagttccttgttttgatatttggcacaagaggatgaaataa
Human PJVK Protein Isoform 4 (NCBI Accession No. NP_001340706.1)
(SEQ ID NO: 57)
MESIRTTRQCSLSVHAGIRGEAMRFHFMDEQNPKGRDKAIVFPAHTTIAFSVFELFIYLDGAFDLCVTSVS
KGGFEREETATFALLYRLRNILFERNRRVMDVISRSQLYLDDLFSDYYDKPLSMTDISLKEGTHIRVNLLN
HNIPKGPCILCGMGNFKRETVYGCFQCSVDGQKYVRLHAVPCFDIWHKRMK
Human PJVK Isoform 4 cDNA
(SEQ ID NO: 58)
atggagagcatccgaaccacacgacagtgctcactgtctgtgcatgctggaattcgaggggaagcaatgcg
gtttcactttatggatgaacagaatcccaagggaagggacaaagctattgttttcccagcacatacaacca
tagotttcagtgtttttgaactottcatatacctggatggtgcctttgacctttgtgtcacttcagtgtca
aaaggaggatttgaaagggaagaaacggcaacatttgcactgctgtacaggttgagaaatatcctatttga
aagaaatagaagagtgatggatgtcatttctcgttcacagotttacttggatgatcttttttctgactact
atgacaaacctctcagcatgactgatatttcactcaaagaagggacccatatccgagttaacttacttaat
cacaacattcccaaagggccttgcatactctgtggaatggggaacttcaaaagggagacagtttatgggtg
ctttcagtgttctgttgatggtcagaagtatgtgagacttcatgcagttccttgttttgatatttggcaca
agaggatgaaataa
Human PJVK Protein Isoform 5 (NCBI Accession No. NP_001340707.1)
(SEQ ID NO: 59)
MESIRTTRQCSLSVHAGIRGEAMRFHFMDEQNPKGRDKAIVFPAHTTIAFSVFELFIYLDGAFDLCVTSVS
KGGFEREETATFALLYRLRNILFERNRRVMDVISRSQLYLDDLFSDYYDKPLSMTDISLKEGTHIRVNLLN
HNIPKGPCILCGMGNFKRETVYGCFQCSVDGQKYVRLHAVPCFDIWHKRMK
Human PJVK Isoform 5 cDNA
(SEQ ID NO: 60)
atggagagcatccgaaccacacgacagtgctcactgtctgtgcatgctggaattcgaggggaagcaatgcg
gtttcactttatggatgaacagaatcccaagggaagggacaaagctattgttttcccagcacatacaacca
tagotttcagtgtttttgaactottcatatacctggatggtgcctttgacctttgtgtcacttcagtgtca
aaaggaggatttgaaagggaagaaacggcaacatttgcactgctgtacaggttgagaaatatcctatttga
aagaaatagaagagtgatggatgtcatttctcgttcacagotttacttggatgatcttttttctgactact
atgacaaacctctcagcatgactgatatttcactcaaagaagggacccatatccgagttaacttacttaat
cacaacattcccaaagggccttgcatactctgtggaatggggaacttcaaaagggagacagtttatgggtg
ctttcagtgttctgttgatggtcagaagtatgtgagacttcatgcagttccttgttttgatatttggcaca
agaggatgaaataa
Human PJVK Protein Isoform 6 (NCBI Accession No. NP_001356841.1)
(SEQ ID NO: 61)
MFAAATKSFVKQVGDGGRLVPVPSLSEADKYQPLSLVVKKKRCFLFPRYKFTSTPFTLKDILLGDREISAG
ISSYQLLNYEDESDVSLYGRRGNHIVNDVGINVAGSDSIAVKASFGIVTKHEVEVSTLLKEITTRKINFDH
SLIRQSRSSRKAVLCVVMESIRTTRQCSLSVHAGIRGEAMRFHFMDEQNPKGRDKAIVFPAHTTIAFSVFE
LFIYLDGAFDLCVTSVSKGGFEREETATFALLYRLRNILFERNRRVMDVISRSQLYLDDLFSDYYDKPLSM
TDISLKEGTHIRVNLLNHNIPKGPCILCGMGNFKRETVYGCFQCSVDGQKYVRLHAVPCFDIWHKRMK
Human PJVK Isoform 6 cDNA
(SEQ ID NO: 62)
atgtttgctgctgctaccaagagctttgtcaagcaagttggagatggagggagattagttcctgttccaag
cctcagtgaagctgacaaatatcaacctctaagtctggtggtaaaaaagaagcgatgctttctgtttccta
gatataaatttacttcaacaccttttacactgaaagatattctcctaggagacagagaaatttcagctggt
atttcatcttatcaattactgaattatgaagatgaatcagatgtttcactctatggaaggcgaggtaacca
tattgtaaatgacgttgggattaacgttgctggatcagattccattgcagtgaaagottcatttggtatag
taaccaaacatgaagtggaagtatcaacattactcaaagaaattactacacgaaaaattaactttgaccac
agottgatacgtcagtcaaggagcagcagaaaggcagtattgtgtgtggtcatggagagcatccgaaccac
acgacagtgctcactgtctgtgcatgctggaattcgaggggaagcaatgoggtttcactttatggatgaac
agaatcccaagggaagggacaaagctattgttttcccagcacatacaaccatagotttcagtgtttttgaa
ctottcatatacctggatggtgcctttgacctttgtgtcacttcagtgtcaaaaggaggatttgaaaggga
agaaacggcaacatttgcactgctgtacaggttgagaaatatcctatttgaaagaaatagaagagtgatgg
atgtcatttctcgttcacagotttacttggatgatcttttttctgactactatgacaaacctctcagcatg
actgatatttcactcaaagaagggacccatatccgagttaacttacttaatcacaacattcccaaagggcc
ttgcatactctgtggaatggggaacttcaaaagggagacagtttatgggtgotttcagtgttctgttgatg
gtcagaagtatgtgagacttcatgcagttccttgttttgatatttggcacaagaggatgaaataa

[0175] In some embodiments of any of the compositions described herein, the PJVK protein comprises a sequence that is at least 75% (e.g., at least 80%, at least 85%, at least 90%, at least 91%, at least 92%, at least 93%, at least 94%, at least 95%, at least 96%, at least 97%, at least 98%, at least 99%) identical to SEQ ID NO: 51.

[0176] In some embodiments of any of the compositions described herein, the PJVK protein comprises a sequence that is at least 75% (e.g., at least 80%, at least 85%, at least 90%, at least 91%, at least 92%, at least 93%, at least 94%, at least 95%, at least 96%, at least 97%, at least 98%, at least 99%) identical to SEQ ID NO: 53.

[0177] In some embodiments of any of the compositions described herein, the PJVK protein comprises a sequence that is at least 75% (e.g., at least 80%, at least 85%, at least 90%, at least 91%, at least 92%, at least 93%, at least 94%, at least 95%, at least 96%, at least 97%, at least 98%, at least 99%) identical to SEQ ID NO: 55.

[0178] In some embodiments of any of the compositions described herein, the PJVK protein comprises a sequence that is at least 75% (e.g., at least 80%, at least 85%, at least 90%, at least 91%, at least 92%, at least 93%, at least 94%, at least 95%, at least 96%, at least 97%, at least 98%, at least 99%) identical to SEQ ID NO: 57.

[0179] In some embodiments of any of the compositions described herein, the PJVK protein comprises a sequence that is at least 75% (e.g., at least 80%, at least 85%, at least 90%, at least 91%, at least 92%, at least 93%, at least 94%, at least 95%, at least 96%, at least 97%, at least 98%, at least 99%) identical to SEQ ID NO: 59.

[0180] In some embodiments of any of the compositions described herein, the PJVK protein comprises a sequence that is at least 75% (e.g., at least 80%, at least 85%, at least 90%, at least 91%, at least 92%, at least 93%, at least 94%, at least 95%, at least 96%, at least 97%, at least 98%, at least 99%) identical to SEQ ID NO: 61.

[0181] A non-limiting example of a human wildtype PJVK genomic DNA sequence is SEQ ID NO: 63. The exons in SEQ ID NO: 63 are: nucleotide positions 5001-5334 (exon 1); nucleotide positions 6953-7185 (exon 2) and nucleotide positions 7897-8092 (exon 3); nucleotide positions 8281-9208 (exon 4); nucleotide positions 9575-9716 (exon 5); nucleotide positions 12075-12192 (exon 6); nucleotide positions 13913-14011 (exon 7); and nucleotide positions 14547-15131 (exon 8). The introns in SEQ ID NO: 63 are: nucleotide positions 1-5000 (intron 1); nucleotide positions 5335-6952 (intron 2); nucleotide positions 7186-7896 (intron 3); nucleotide positions 8093-8280 (intron 4); nucleotide positions 9209-9574 (intron 5); nucleotide positions 9717-12074 (intron 6); nucleotide positions 12193-13912 (intron 7); and nucleotide positions 14012-14546 (intron 8).

| Human PJVK Gene Sequence (NCBI Reference Sequence: NG_012186.1) | |
|---|---|
| (SEQ ID NO: 63) | |
| 1 | tttcttgccg ggagagaggg attagaggga ttgtcoggcg tgggtctagg gtcgttgagg |
| 61 | cctaaagtta agcctttgtg gggaggacgg attgggggct gggtcacttt aagaaaaaga |
| 121 | ttctaaaatt acgaaggcag aattccaggg agtctccojg gcctggtcct gaagcttgag |
| 181 | accccggata tatacgctcc agggggctgc ggtgcgctct tcgggtcccc gagccctgtg |
| 241 | tttaggaaca cgoggggacg tccaaacacc cgctoctotc ccgccgggcg ggctcctttg |
| 301 | tcttctgggc tttcgtcgcg agatggaacg ctgggtcagt gcatcccagc aaaacacgtt |
| 361 | aggagtaaac gaaggccttt cojgggacct gggtagtojg ttgtaatggc gtttgcctgg |
| 421 | gatgcagcac ctttggtggg ccattagatg acgtgtcgct tctccagggg cttgctaggc |
| 481 | actagcagaa atgctcccct gtgcttactc ggtgttatgg aagattgctt gcacaatgct |
| 541 | attcgtacga aaggatatta ttaaaagtga tttatgggcg ggcgcggtgg ctcacgcctg |
| 601 | taatcccagc actttaggag gccgaggctg gcggatcgcc tgaagtaagc agttcgagac |
| 661 | cagcctggcc aacatggtga aaccctgtct ctactaaaaa tacaaaaatt agccgggcgt |
| 721 | ggtggcatgc gcctgtaatc ccagctactc gggaggctaa agcaggagaa tcgcttgaac |
| 781 | cojggaggca aabittgcag tgagccgaga tcgcgccact gcactccagc ctgggcgaca |
| 841 | gagtcagact ccctctcaaa aaaaaaaaaa aaaaaaaaag cgatttgttg ttttgttagc |
| 901 | atgtaagccc tggatgcttg aaacaagtga aagatgttca gaatctaatc aaattatatc |
| 961 | atctgatgct ttaattagag cctattctct cttcctctcc gtctatatat gtatgtatat |
| 1021 | agattactat ccatcactgt tttaatggat atcttattgg aagggctaca tagtcagtat |
| 1081 | ttcacaatat atgaactccg cataacacct atggcaaaac atttcagcac tcaggtaaaa |
| 1141 | ttcatttttt gccacaaaat tacttaaaaa caggccagaa ctttatatag ctcttgttaa |
| 1201 | aggttaagta gcbjggataa taatgaaaca aaaagatgca gcaggactcc atttcaaaga |
| 1261 | gagagagtct gtgtgcccaa cttcagagta agaaaccact aggtaatagt ttatatagtt |
| 1321 | acttatatgt aatgtggctt tattttttaa ataaagattt gcatataatt gtttatatct |
| 1381 | gtgaatttat atttaatatt aaacacagtt ttgtaagcat ataagatgga aaatgaatga |
| 1441 | aatgctcaat caatgagctg tatgccatga ggattcaaaa cagcactttg gtgttgccaa |
| 1501 | aattccggtg gtggacttgt gaaggaattc cctttggact aggtccactg tagattgtat |
| 1561 | cojggactat cgttagtgcc taaattgcat tgcttcccac agcactatat gcttccctta |
| 1621 | aaattggccc attgccagtg gcaaatcact atctactgtg atccttatca tagacattgg |
| 1681 | tcatattttt acgttattag ttttctgtgt atattttagt gctatagcct gccattccaa |
| 1741 | gttaaacatg ctcttagcat atcattttac accgttgatc tataattcat tacctgagca |
| 1801 | catgagcaga ggcagggaat tatacagtgg taaactactt ggtgaaacca tgctttgtat |
| 1861 | ttttaagatg tataattata tttaaaaaca agcaatgctt aattttgtgc ctgattttcc |
| 1921 | tctttaaaaa tggatttatc tgggggttgc agttgatgac gttttgattt taatatgttt |
| 1981 | gctgctgcta ccaagagctt tgtcaagcaa gttggagatg gagggagatt agttcctgtt |
| 2041 | ccaagcctca gtgaagctga caaatatcaa cctctaagtc tggtggtaaa aaagaagcga |
| 2101 | tgctttctgt ttcctagata taaatttact tcaacacctt ttacactgaa agatattctc |
| 2161 | ctaggagaca gagaaatttc agctggtaag tttaaatgtt tgggagtgcc aactcattca |
| 2221 | tctgtattat tggcaaccta aacataggtc atatatgcta cttatgttag taatacacat |
| 2281 | tttcaatgat taaagcaact tttattatga bittagtgta ataacattat taagattaac |
| 2341 | aatgccaaaa gtttgtataa tatcaaatct cttattggtc aaataatttt caaatctatc |
| 2401 | aattatttta taaattgttt taaccaaatc aacttagaat atgacatatt tcttcatcta |
| 2461 | taaaatggga tattatttgg gcttacctat gttacatggt caaatgagat gaaaataatt |
| 2521 | tgtatttatt ttttacaatt caattattac aattggtaaa ctgaaatgta ttgaagggta |
| 2581 | ggttatataa taagctgata ttttgatgag ttactactta taaacgctta ttttttcttt |
| 2641 | taattgcccg gtggatcttg atgcttaaga agttctgttg gctgaataga aaatttgagt |
| 2701 | tccttttaag aattctggct atgtgtttct ttttgttgta agattaattg aattactact |
| 2761 | ttaagtcttg gtgagtcatg ttgcctttct ctaacatttg ggtatttgag tcttcaattg |
| 2821 | ttaatttaac atgttactat atataatcta cataagataa agatgtttaa aaaatactga |
| 2881 | gtttcttctt ataaaggtat ttcatcttat caattactga attatgaaga tgaatcagat |
| 2941 | gtttcactct atggaaggcg aggtaaccat attgtaaatg acgttgggat taacgttgct |
| 3001 | ggatcagatt ccattgcagt gaaagcttca tttggtatag taaccaaaca tgaagtggaa |
| 3061 | gtatcaacat tactcaaaga aattactaca cggtcagtat aataatccta atatatttca |
| 3121 | gtgttttcat taaatacttt aggtatataa acttcattac aaagaatgct taaaacattg |
| 3181 | aggttgtatt ttactagtgt aatttgctag atatgtttga aatacattgg tagtatatcc |
| 3241 | aaactttgaa taaggataga tatcaaaaat cacttggctg aagtcagaga cctcagggcc |
| 3301 | ccagatcaag gagctaactg atgaagaggc agagaggctg cagctagaga ttgaccagaa |
| 3361 | ataggatgca gagaatcatg aggcccagat caagaatggc agccttgact ccccagggaa |
| 3421 | gcagaagact gaggaagatg aggaggagga agatgagaag gacaaaggaa aactgaagcc |
| 3481 | caacctaggc aacagggcag acctgcctga ttaccgctgg accaagaccc tgtcggagct |
| 3541 | ggacctggcg gtccctttct gtgtggactt ccagctgaaa gggaaggacg tggtggtggc |
| 3601 | atccaacggc ggcacctcca ggtggggctc aaggggcagc cagcgatcat cgatggggag |
| 3661 | ctctacaacg aagtgaaggc ggaggagagc tcgtggctca ttgaggacgg caaggtggtg |
| 3721 | actgtgcatc tggagaagat caagaagatg gagtggtgga gccgcttggt gtccagtgac |
| 3781 | cctgagatca ataccaagaa gattaaccct gagaattcca agctgtcaga cctggacagt |
| 3841 | gagactcaca tcatggtgga aaagacaatc tatgaccagt aacagaagtc catggggctg |
| 3901 | ccaacctcag acgaacagaa gaaacaggag attctgaaga agttcatgga tcagcatccg |
| 3961 | gagatggatt tttccaaggc taaattcaac tagcccctgt ttttccctcc ctgaactctt |
| 4021 | ggggctgagc tgcaaccacc caactttctt tcccactctt ctctgggact tgtgggcctc |
| 4081 | agggcttggg gcaggcatgg gactggccca ggcacacagg tcccagggca tcaggagaaa |
| 4141 | ggctggggct tggggtcttg tcctccccag ttggcctact gttacacatt aaaatgattt |
| 4201 | gcccagctaa aaaaaaaaaa aaaccacttg gcttaaacaa aacttttaat tgttccacaa |
| 4261 | aattactttg gctctacaca catttgctta attattagat ttaaataata cagcaatctg |
| 4321 | tctgcaacaa atagagtccc cttcaacaga ctttcaacag acagagtgaa acattctgca |
| 4381 | taagcatgtt ttaagaaaat agagaggaga gacaaattat tacatttctt ttgggtgtat |
| 4441 | tttctgacta ttaggattgc cttgatttac tattaggtga actatgaatg aataacacat |
| 4501 | gatagcaaaa aatgtatttg attatgtgta attagatgtt atagagtctt gtgaatgtat |
| 4561 | cttctttatt ttagaaaaat taactttgac cacagcttga tacgtcagtc aaggagcagc |
| 4621 | agaaaggcag tattgtgtgt ggtcatggag agcatccgaa ccacacgaca gtgctcactg |
| 4681 | tctgtgcatg ctggaattcg aggggaagca atgcgggtaa accacacttg ttgggttctc |
| 4741 | ttactaacta aagtgttgcc atgggaattt ttttaagtat tgaatttcta gtcaggcttg |
| 4801 | tgtattttgt gaaatgttct gatgaaagag ctgcagttgt ataggatttt gcacagcaat |
| 4861 | gtctgttcta gaatatgaaa aaaaaaaaca aatcttggga ttctaaacat gtgtaatata |
| 4921 | atgcaaaaac agtaatcctt gtgaaattac gtgcatactg gagtccctca agttactatt |
| 4981 | taagtgttgt tttaagaata aaaattgagt gagttgaatt gattttattt ttaagtgata |
| 5041 | cagtttttga ctgggcacag tggctcacgc ctgtaatcct agcattttgg gaggccgagg |
| 5101 | tgggcggatc acttgcagtc aggagttgga gatcaagttg ggcaacacag agaaacccca |
| 5161 | tctctactga aaatacaaaa attagccagg tgtggtggta cacccctgta atcccaagcc |
| 5221 | actcaggaag ctgaggcaca agaatcactt gaacctggga ggtggaggtt gcagtgagcc |
| 5281 | gagattgtgc cattgcactc taacctgggt ggcagagtga gactccgtct caaaaaaaca |
| 5341 | aaacaaaaca aaaaccccaa ccaaaaaaaa aatgtgtaac ataatgcaaa aacagtaatc |
| 5401 | cttgtgaaat tacatgcata ctggagtccc tcatattact atttaagtgc tgttttaaga |
| 5461 | ataaaaattg agtgcttaag ttgaattgat ttaagtgata gagtttttac actttgaatt |
| 5521 | ttttaaagct gaatttatag attttttttt tgagacggag tctcgctctg tccccgaggc |
| 5581 | tggagtgcag tggcgcgatc ttggctcact gcaaactccg cctccojggt tcatgccatt |
| 5641 | cttctgcctc agcctcccga gtagcbjgga ctacaggcac ctgccaccac gcccggcagt |
| 5701 | gttatccagg atggtttcga tctcctgacc tcgtgatccg ctagcctojg cctcccaaaa |
| 5761 | tgctgggatt acaggtgtga gccaccgcgc ctggcctgaa tttatatttt tatattcaaa |
| 5821 | tagtttttca aagttaatat tatcaatggc catacatgct ttattcaagg ttagttaaat |
| 5881 | cctttaaaaa atattagcgg caaggtgcag tggatcatgc ctgtaatccc agtgcttagg |
| 5941 | aagactgaga taggaagaca gcttgggacc aggagttcaa gaccaacttg agcaaaataa |
| 6001 | tgagaccttg tctctacaaa aaataaaaga attagctggt tgtggtggca catgcctata |
| 6061 | gtcccagcta ctcggaaggc tgaggcaggg ggctgcctgc ggggtttggg tcattgtctt |
| 6121 | ttagaatttg ggaggctttg aaaagccgtg cttttgtgct ggggaagatg tagcagtctc |
| 6181 | ttctccaaac cacccatttg ccttcggact tctctggggc cagcagccat ccaactaggg |
| 6241 | gccojgggcc acgggctcag ctgacgacca tgggcttcgc gtccaaccag cagtttgcag |
| 6301 | gttcgagctc aggacttggc ggggacacct taggatgcag gagtggccag gagttcaagg |
| 6361 | ttacagtagg ctatgattgt gccactgctc tccagcctgg gtgacagaga gagaccctgt |
| 6421 | ctctgaaaaa aaaattggaa aagtatctgt gtttaatttt cagctcaatt atgatattgt |
| 6481 | ttatctttgt cattcagtga cacctaataa tgacttgatt ggattaaaac caattgttag |
| 6541 | aaagataggg ttcaaggata atcttttcaa gtctttgcaa ataaaagtta ttttcgcata |
| 6601 | ttcagctgcc tgtcaaattc tgattaacat tggatcattt ttgaggcaca aactgaaaca |
| 6661 | tttacttgat tgttagcgat tgctttagaa agctactaaa agctctggag ggctttggaa |
| 6721 | tggtagacag gctaggctga aaactttaac tctggcactg ctttctaaga tttcctgtta |
| 6781 | aaaaaaaaaa aaaggcttct gctccagagc attatggttg tggtagcact aatcatgggc |
| 6841 | tgtaatacca aagtaagtga aaagtgcaga ggtatttcct aatatagacc aggagtttct |
| 6901 | gttggaccaa ttggatctct gctataaaaa atggtttaat tcaagcagaa taatccttta |
| 6961 | cttgggaatt ttttgttttg tttttggtag gattatagga aatgtttcat ttctccaaaa |
| 7021 | agctatcctt acatgttatg atccttaatt atgttattta tttattcaat atagtttcac |
| 7081 | tttatggatg aacagaatcc caagggaagg gacaaagcta ttgttttocc agcacataca |
| 7141 | accatagctt tcagtgtttt tgaactcttc atatacctgg atggtgcctt tggtgagtta |
| 7201 | agggtctgca tgaaatacaa atgattatat ttttaaggag cattcattag ggcatgtgct |
| 7261 | ctctctctct cttttctctc atttctcgtg tctaacaatt atagaagatg ctctcagcac |
| 7321 | tgtcaatctt atgctttggc aaaatagctg agaaagaccc tccgttcgct gcttccccat |
| 7381 | tccacttttc tgcttcttgg tgaaggttgt aaactctcca ctaccccatt taaaattata |
| 7441 | aataagagct aaaatgccat ctactgacaa agtattcctt agcttacatg gggagataat |
| 7501 | aaatgacctt cttataggta gtttttgatg gtggcaaaca gaggagtagg tagatagtag |
| 7561 | gatgcctgaa gtgttaggat gcccaaacca gggcctctaa agacagcttt tcttacttca |
| 7621 | gttttactta tcatagaccc agcttcccct tgcactcttc ctaaaaaata actttaaaaa |
| 7681 | gtgaaaatac ttcctccaaa attgtcacct tgtataatac ctaagtgcag ctcactttag |
| 7741 | gtctctacat ttcacaggtc tttaaggtct gttggccaac tggaacaagt ccaggtgtag |
| 7801 | cccaagggat caggaaaggc agcccctagc catggtaatt tacaaatgtt tttagacctg |
| 7861 | ttcttgttca tttctgcaat tttgtaggag gagggaatag ggagtccaga aacaaaacaa |
| 7921 | aactacatgt taagtaaatt gtctttttaa aaaatatttt taatttttgt ggctatatag |
| 7981 | tagattatat atatatttat gtatgggata catgaggtat tttgatacgg gcatacagtg |
| 8041 | cataataatc acatcatgga aaatggggta tccatcccct caagcattta tcctttgtgt |
| 8101 | tacaaacaat ccaattatac tcttttagtt atttaaaaat gtacaaattc tcagtctaag |
| 8161 | atggagaaaa aactgtacaa ttacattatt ttgactgtag tcaccctatt atgcttccaa |
| 8221 | atactaggtc ttattaagta aattctaatt ggataacttt aggtttttac agttttattg |
| 8281 | atggttggga ggaatgtaaa tggactgata tatccacaag aatttaaaat atatatataa |
| 8341 | tttggacttc cacttctagg aatttatcct acagatatat ttacacatat atgaaatgat |
| 8401 | atgagtgcaa gtatattcag tcctcaataa caagagattg gaaacaacat taaggagact |
| 8461 | aaataatggt gcatccttgc aagagaatac tatgaagcca ataagaatat aatactttta |
| 8521 | atagatattt ttcaagagct gagtataata tgtaactatt tgggcataaa taattttata |
| 8581 | cacatacatg tatatatgca tctttcttta tgcttataaa atatatggag tatttctgga |
| 8641 | agcaaacata agaaacttaa accacgggtg cccctaagcc cctgaggtag aagactgtgg |
| 8701 | ctggatacag ggtgggccag agacctattt gtcactgtat ctcctttctg tatgaatttt |
| 8761 | gtaccatgtg aatgttacct tttccaaaag tatgtaaaag tcaactttta aaaacaatac |
| 8821 | aatgaatgat ttgtactaga attcatcacc ccatcaaaca ataaaatatg aattattcaa |
| 8881 | gttataacat cttctaacaa ttttttttgt agacctttgt gtcacttcag tgtcaaaagg |
| 8941 | aggatttgaa agggaagaaa cggcaacatt tgcactgctg tacaggttga gaaatatcct |
| 9001 | atttgaaaga agtatgttta ttgaagagta ctgtgaatgt cttttttttt tctttcctgg |
| 9061 | cttaacacat gaggttttct attcagtaat ctcatctgtt aaggaaaaat ttaaatttaa |
| 9121 | aagcctggct ggtatggtgg ctcatgccta taatcccagc actttgggag gccagggcag |
| 9181 | gcagattgct agcactcaga agtttgaaac acttgggcaa tgtgagaaaa ccccatctgt |
| 9241 | acaaagaata caaaagaaaa aaaattagtt ggttgcagtg gtgtgcacct gtagtcccag |
| 9301 | ctacttgaga ggctgaggta ggaggatcac ttgagcgtgg gaggcggagg ttgtagtaag |
| 9361 | tggagattgt gccactgccc tccagottgg gtgacagagc cagaccctgt ctcaaaaaaa |
| 9421 | aaaaaaaaaa aaaaaaagcc aaattatttc atgactagtg gattcacata tttattaatg |
| 9481 | ctgtttgcat tatgtatttt tcattttcac ttctaacaca tttcttttct gtttttgtcc |
| 9541 | ttttagatag aagagtgatg gatgtcattt ctcgttcaca gctttacttg gatgatcttt |
| 9601 | tttctgacta ctatgacaaa cctctcagca tgactgatat ttcactcaaa gaagggaccc |
| 9661 | atatccgagt taacttactt aatcacaaca ttcccaaagg gccttgcata ctctgtggaa |
| 9721 | tggggaactt caaaagggag acagtttatg ggtgctttca gtgttctgtt gatggtcaga |
| 9781 | agtatgtgag acttcatgca gttccttgtt ttgatatttg gcacaagagg atgaaataaa |
| 9841 | atgaaaaatg aatacaccgt gttggtgttt taggtgcagt tgtgccacaa accttcccta |
| 9901 | aattatctag gtttgctttg atgaattaaa ttaaaatgag aaaagcaaaa agaaattaac |
| 9961 | ctgtctgggt atcatattcc ctatctataa agtagcaatt ataacagtag tgtctatttc |
| 10021 | ttaagttgtc atgaaaatta ataacattgt ttatatcaaa aaagatttac atataaaatt |
| 10081 | cagagattat gaatcatgcc agtcacttta gaatcatttt tgggatgtag t |

### Heat Shock Protein Family a (Hsp70) Member 1A (HSPA1A)

[0182] The HSPA1A gene encodes “heat shock protein family A member 1A” (HSPA1A). The human HSPA1A gene is located on chromosome 6p21.33. It contains 1 exon, encompassing ˜2400 bp (NCBI Accession No. NC_000006.12). HSPA1A encodes a 70 kDa heat shock protein, which stabilizes proteins against protein aggregation and is involved in protein folding.

[0183] Exemplary wildtype HSPA1A protein sequences are or include SEQ ID NO: 64, SEQ ID NO: 66, SEQ ID NO: 68, SEQ ID NO: 69, SEQ ID NO: 70, and SEQ ID NO: 93. Exemplary DNA sequences that encode a NDP protein are shown below.

Human Mature HSPA1A Protein (NCBI Accession No. NP_005336.3)
(SEQ ID NO: 64)
MAKAAAIGIDLGTTYSCVGVFQHGKVEIIANDQGNRTTPSYVAFTDTERLIGDAAKNQVALNPQNTVFDAK
RLIGRKFGDPVVQSDMKHWPFQVINDGDKPKVQVSYKGETKAFYPEEISSMVLTKMKEIAEAYLGYPVTNA
VITVPAYFNDSQRQATKDAGVIAGLNVLRIINEPTAAAIAYGLDRTGKGERNVLIFDLGGGTFDVSILTID
DGIFEVKATAGDTHLGGEDFDNRLVNHFVEEFKRKHKKDISQNKRAVRRLRTACERAKRTLSSSTQASLEI
DSLFEGIDFYTSITRARFEELCSDLFRSTLEPVEKALRDAKLDKAQIHDLVLVGGSTRIPKVQKLLQDFFN
GRDLNKSINPDEAVAYGAAVQAAILMGDKSENVQDLLLLDVAPLSLGLETAGGVMTALIKRNSTIPTKQTQ
IFTTYSDNQPGVLIQVYEGERAMTKDNNLLGRFELSGIPPAPRGVPQIEVTFDIDANGILNVTATDKSTGK
ANKITITNDKGRLSKEEIERMVQEAEKYKAEDEVQRERVSAKNALESYAFNMKSAVEDEGLKGKISEADKK
KVLDKCQEVISWLDANTLAEKDEFEHKRKELEQVCNPIISGLYQGAGGPGPGGFGAQGPKGGSGSGPTIEE
VD
Human Mature HSPA1A cDNA
(SEQ ID NO: 65)
atggccaaagccgcggcgatcggcatcgacctgggcaccacctactcctgcgtgggggtgttccaacacgg
caaggtggagatcatcgccaacgaccagggcaaccgcaccaccoccagctacgtggccttcacggacaccg
agoggctcatcggggatgcggccaagaaccaggtggcgctgaacccgcagaacaccgtgtttgacgcgaag
cggctgatcggccgcaagttcggcgaccoggtggtgcagtoggacatgaagcactggcctttccaggtgat
caacgacggagacaagcccaaggtgcaggtgagctacaagggggagaccaaggcattctaccccgaggaga
tctcgtccatggtgctgaccaagatgaaggagatcgccgaggcgtacctgggctaccoggtgaccaacgcg
gtgatcaccgtgccggcctacttcaacgactcgcagcgccaggccaccaaggatgogggtgtgatcgcggg
gctcaacgtgctgoggatcatcaacgagcccacggccgccgccatcgcctacggcctggacagaacgggca
agggggagcgcaacgtgctcatctttgacctgggcgggggcaccttcgacgtgtccatcctgacgatcgac
gacggcatcttcgaggtgaaggccacggccggggacacccacctgggtggggaggactttgacaacaggct
ggtgaaccacttcgtggaggagttcaagagaaaacacaagaaggacatcagccagaacaagcgagccgtga
ggcggctgcgcaccgcctgcgagagggccaagaggaccctgtcgtccagcacccaggccagcctggagatc
gactocctgtttgagggcatcgacttctacacgtccatcaccagggcgaggttcgaggagctgtgctccga
cctgttccgaagcaccctggagcccgtggagaaggctctgcgcgacgccaagctggacaaggcccagattc
acgacctggtoctggtogggggctccacccgcatccccaaggtgcagaagctgctgcaggacttcttcaac
gggcgcgacctgaacaagagcatcaaccccgacgaggctgtggcctacggggcggcggtgcaggcggccat
cctgatgggggacaagtccgagaacgtgcaggacctgctgctgctggacgtggctoccctgtcgctggggc
tggagacggccggaggcgtgatgactgccctgatcaagcgcaactccaccatccccaccaagcagacgcag
atcttcaccacctactccgacaaccaaccoggggtgctgatccaggtgtacgagggcgagagggccatgac
gaaagacaacaatctgttggggcgcttcgagctgagoggcatccctccggcccccaggggcgtgccccaga
tcgaggtgaccttcgacatcgatgccaacggcatcctgaacgtcacggccacggacaagagcaccggcaag
gccaacaagatcaccatcaccaacgacaagggccgcctgagcaaggaggagatcgagcgcatggtgcagga
ggcggagaagtacaaagoggaggacgaggtgcagcgcgagagggtgtcagccaagaacgccctggagtcct
acgccttcaacatgaagagcgccgtggaggatgaggggctcaagggcaagatcagcgaggcggacaagaag
aaggttctggacaagtgtcaagaggtcatctcgtggctggacgccaacaccttggccgagaaggacgagtt
tgagcacaagaggaaggagctggagcaggtgtgtaaccccatcatcagoggactgtaccagggtgccggtg
gtccogggcctgggggcttcggggctcagggtcccaagggagggtctgggtcaggccccaccattgaggag
gtggattag
Human Mature HSPA1A cDNA
(SEQ ID NO: 94)
atgtaccggatgcagctgctgagctgtatcgccctgtctctggccctggtcaccaattctgccaaagccgc
ggcgatcggcatcgacctgggcaccacctactcctgcgtgggggtgttccaacacggcaaggtggagatca
tcgccaacgaccagggcaaccgcaccaccoccagctacgtggccttcacggacaccgagcggctcatcggg
gatgoggccaagaaccaggtggcgctgaacccgcagaacaccgtgtttgacgcgaagoggctgatcggccg
caagttcggcgacccggtggtgcagtcggacatgaagcactggcctttccaggtgatcaacgacggagaca
agcccaaggtgcaggtgagctacaagggggagaccaaggcattctaccccgaggagatctcgtccatggtg
ctgaccaagatgaaggagatcgccgaggcgtacctgggctacccggtgaccaacgcggtgatcaccgtgcc
ggcctacttcaacgactcgcagcgccaggccaccaaggatgcgggtgtgatcgcggggctcaacgtgctgc
ggatcatcaacgagcccacggccgccgccatcgcctacggcctggacagaacgggcaagggggagcgcaac
gtgctcatctttgacctgggcgggggcaccttcgacgtgtccatcctgacgatcgacgacggcatcttcga
ggtgaaggccacggccggggacacccacctgggtggggaggactttgacaacaggctggtgaaccacttcg
tggaggagttcaagagaaaacacaagaaggacatcagccagaacaagcgagccgtgaggcggctgcgcacc
gcctgcgagagggccaagaggaccctgtcgtccagcacccaggccagcctggagatcgactccctgtttga
gggcatcgacttctacacgtccatcaccagggcgaggttcgaggagctgtgctccgacctgttccgaagca
ccctggagcccgtggagaaggctctgcgcgacgccaagctggacaaggcccagattcacgacctggtcctg
gtcgggggctccacccgcatccccaaggtgcagaagctgctgcaggacttcttcaacgggcgcgacctgaa
caagagcatcaaccccgacgaggctgtggcctacggggcggcggtgcaggcggccatcctgatgggggaca
agtccgagaacgtgcaggacctgctgctgctggacgtggctcccctgtcgctggggctggagacggccgga
ggcgtgatgactgccctgatcaagcgcaactccaccatccccaccaagcagacgcagatcttcaccaccta
ctccgacaaccaacccggggtgctgatccaggtgtacgagggcgagagggccatgacgaaagacaacaatc
tgttggggcgcttcgagctgagcggcatccctccggcccccaggggcgtgccccagatcgaggtgaccttc
gacatcgatgccaacggcatcctgaacgtcacggccacggacaagagcaccggcaaggccaacaagatcac
catcaccaacgacaagggccgcctgagcaaggaggagatcgagcgcatggtgcaggaggcggagaagtaca
aagcggaggacgaggtgcagcgcgagagggtgtcagccaagaacgccctggagtcctacgccttcaacatg
aagagcgccgtggaggatgaggggctcaagggcaagatcagcgaggcggacaagaagaaggttctggacaa
gtgtcaagaggtcatctcgtggctggacgccaacaccttggccgagaaggacgagtttgagcacaagagga
aggagctggagcaggtgtgtaaccccatcatcagcggactgtaccagggtgccggtggtcccgggcctggg
ggcttcggggctcagggtcccaagggagggtctgggtcaggccccaccattgaggaggtggattaa

[0184] In some embodiments of any of the compositions described herein, the HSPA1A protein comprises a sequence that is at least 75% (e.g., at least 80%, at least 85%, at least 90%, at least 91%, at least 92%, at least 93%, at least 94%, at least 95%, at least 96%, at least 97%, at least 98%, at least 99%) identical to SEQ ID NO: 64.

[0185] In some embodiments of any of the compositions described herein, the HSPA1A protein comprises a sequence that is at least 75% (e.g., at least 80%, at least 85%, at least 90%, at least 91%, at least 92%, at least 93%, at least 94%, at least 95%, at least 96%, at least 97%, at least 98%, at least 99%) identical to SEQ ID NO: 66.

[0186] In some embodiments of any of the compositions described herein, the HSPA1A protein comprises a sequence that is at least 75% (e.g., at least 80%, at least 85%, at least 90%, at least 91%, at least 92%, at least 93%, at least 94%, at least 95%, at least 96%, at least 97%, at least 98%, at least 99%) identical to SEQ ID NO: 68.

[0187] In some embodiments of any of the compositions described herein, the HSPA1A protein comprises a sequence that is at least 75% (e.g., at least 80%, at least 85%, at least 90%, at least 91%, at least 92%, at least 93%, at least 94%, at least 95%, at least 96%, at least 97%, at least 98%, at least 99%) identical to SEQ ID NO: 69.

[0188] In some embodiments of any of the compositions described herein, the HSPA1A protein comprises a sequence that is at least 75% (e.g., at least 80%, at least 85%, at least 90%, at least 91%, at least 92%, at least 93%, at least 94%, at least 95%, at least 96%, at least 97%, at least 98%, at least 99%) identical to SEQ ID NO: 70.

[0189] In some embodiments of any of the compositions described herein, the HSPA1A protein comprises a sequence that is at least 75% (e.g., at least 80%, at least 85%, at least 90%, at least 91%, at least 92%, at least 93%, at least 94%, at least 95%, at least 96%, at least 97%, at least 98%, at least 99%) identical to SEQ ID NO: 94.

Mouse Mature HSPA1A Protein (NCBI Accession No. NP_034609.2)
(SEQ ID NO: 66)
MAKNTAIGIDLGTTYSCVGVFQHGKVEIIANDQGNRTTPSYVAFTDTERLIGDAAKNQVALNPQNTVFDAK
RLIGRKFGDAVVQSDMKHWPFQVVNDGDKPKVQVNYKGESRSFFPEEISSMVLTKMKEIAEAYLGHPVTNA
VITVPAYFNDSQRQATKDAGVIAGLNVLRIINEPTAAAIAYGLDRTGKGERNVLIFDLGGGTFDVSILTID
DGIFEVKATAGDTHLGGEDFDNRLVSHFVEEFKRKHKKDISQNKRAVRRLRTACERAKRTLSSSTQASLEI
DSLFEGIDFYTSITRARFEELCSDLFRGTLEPVEKALRDAKMDKAQIHDLVLVGGSTRIPKVQKLLQDFFN
GRDLNKSINPDEAVAYGAAVQAAILMGDKSENVQDLLLLDVAPLSLGLETAGGVMTALIKRNSTIPTKQTQ
TFTTYSDNQPGVLIQVYEGERAMTRDNNLLGRFELSGIPPAPRGVPQIEVTFDIDANGILNVTATDKSTGK
ANKITITNDKGRLSKEEIERMVQEAERYKAEDEVQRDRVAAKNALESYAFNMKSAVEDEGLKGKLSEADKK
KVLDKCQEVISWLDSNTLADKEEFVHKREELERVCSPIISGLYQGAGAPGAGGFGAQAPKGASGSGPTIEE
VD
Mouse Mature HSPA1A cDNA
(SEQ ID NO: 67)
atggccaag aacacggcga tcggcatcga cctgggcacc acctactcgt gcgtgggcgt
gttccagcac ggcaaggtgg agatcatcgc caacgaccag ggcaaccgca cgacccccag
ctacgtggcc ttcaccgaca ccgagcgcct catcggagac gccgccaaga accaggtggc
gctgaacccg cagaacaccg tgttcgacgc gaagcggctg atcggccgca agttcggcga
tgcggtggtg cagtccgaca tgaagcactg gccottccag gtggtgaacg acggcgacaa
goccaaggtg caggtgaact acaagggcga gagccggtog ttottccogg aggagatctc
gtccatggtg ctgacgaaga tgaaggagat cgctgaggcg tacctgggcc acccggtgac
caacgcggtg atcacggtgc ccgcctactt caacgactct cagojgcagg ccaccaagga
cgcgggcgtg atcgccggtc taaacgtgct gcggatcatc aacgagccca cggcggccgc
catcgcctac gggctggacc ggaccggcaa gggcgagcgc aacgtgctca tcttcgacct
ggggggcggc acgttcgacg tgtccatcct gacgatcgac gacggcatct tcgaggtgaa
ggccacggcg ggcgacacgc acctgggagg ggaggacttc gacaaccggc tggtgagcca
cttcgtggag gagttcaaga ggaagcacaa gaaggacatc agccagaaca agcgcgcggt
gojgcggctg cgcactgcgt gtgagagggc caagaggacg ctgtcgtcca gcacccaggc
cagcctggag atcgactctc tgttcgaggg catcgacttc tacacatcca tcacgcgggc
gog-gttcga gagctgtgct cagacctgtt ccgcggcacg ctggagcccg tggagaaggc
cctgcgcgac gccaagatgg acaaggcgca gatccacgac ctggtgctgg tgggcggctc
gacgcgcatc cccaaggtgc agaagctgct gcaggacttc ttcaacgggc gcgacctgaa
caagagcatc aaccoggacg aggcggtggc ctacggggcg goggtgcagg cggccatcct
gatgggggac aagtojgaga acgtgcagga cctgctgctg ctggacgtgg cgccgctgtc
gctgggcctg gagactgcgg gojgcgtgat gacggcgctc atcaagcgca actccaccat
ccccaccaag cagacgcaga ccttcaccac ctactcggac aaccagcccg gggtgctgat
ccaggtgtac gagggcgaga gggccatgac gcgcgacaac aacctgctgg ggcgcttcga
actgagojgc atcccgccgg cgcccagggg cgtgccacag atcgaggtga ccttcgacat
cgacgccaac ggcatcctga acgtcacggc caccgacaag agcaccggca aggccaacaa
gatcaccatc accaacgaca agggccgcct gagcaaggag gagatcgagc gcatggtgca
ggaggccgag cgctacaagg ccgaggacga ggtgcagcgc gacagggtgg ccgccaagaa
cgcgctcgaa tcctatgcct tcaacatgaa gagcgccgtg gaggacgagg gtctcaaggg
caagctcagc gaggctgaca agaagaaggt gctggacaag tgccaggagg tcatctcctg
gctggactcc aacacgctgg ccgacaagga ggagttcgtg cacaagojgg aggagctgga
gojggtgtgc agccccatca tcagtgggct gtaccagggt gojggtgctc ctggggctgg
gggcttoggg gcccaggcgc ccaagggagc ctctggctca ggacccacca tcgaggaggt
ggattaga
Rhesus Monkey Mature HSPA1A Protein (NCBI Accession No. XP_014991489.2)
(SEQ ID NO: 68)
MAKAAAIGIDLGTTYSCVGVFQHGKVEIIANDQGNRTTPSYVAFTDTERLIGDAAKNQVALNPQNTVFDAK
RLIGRKFGDPVVQSDMKHWPFQVINDGDKPKVQVSYKGETKAFYPEEISSMVLTKMKEIAEAYLGYPVTNA
VITVPAYFNDSQRQATKDAGVIAGLNVLRIINEPTAAAIAYGLDRTGKGERNVLIFDLGGGTEDVSILTID
DGIFEVKATAGDTHLGGEDFDNRLVNHFVEEFKRKHKKDISQNKRAVRRLRTACERAKRTLSSSTQASLEI
DSLFEGIDFYTSITRARFEELCSDLFRSTLEPVEKALRDAKLDKAQIHDLVLVGGSTRIPKVQKLLQDFFN
GRDLNKSINPDEAVAYGAAVQAAILMGDKSENVQDLLLLDVAPLSLGLETAGGVMTALIKRNSTIPTKQTQ
IFTTYSDNQPGVLIQVYEGERAMTKDNNLLGRFELSGIPPAPRGVPQIEVTFDIDANGILNVTATDKSTGK
ANKITITNDKGRLSKEEIERMVQEAEKYKAEDEVQRERVSAKNALESYAFNMKSAVEDEGLKGKISEADKK
KVLDKCQEVISWLDANTLAEKDEFEHKRKELEQVCNPIISGLYQGAGGPGPGGFGAQGPKGGSGSGPTIEE
VD
Rat Mature HSPA1A Protein (NCBI Accession No. NP_114177.2)
(SEQ ID NO: 69)
MAKKTAIGIDLGTTYSCVGVFQHGKVEIIANDQGNRTTPSYVAFTDTERLIGDAAKNQVALNPQNTVFDAK
RLIGRKFGDPVVQSDMKHWPFQVVNDGDKPKVQVNYKGENRSFYPEEISSMVLTKMKEIAEAYLGHPVTNA
VITVPAYFNDSQRQATKDAGVIAGLNVLRIINEPTAAAIAYGLDRTGKGERNVLIFDLGGGTFDVSILTID
DGIFEVKATAGDTHLGGEDFDNRLVSHFVEEFKRKHKKDISQNKRAVRRLRTACERAKRTLSSSTQASLEI
DSLFEGIDFYTSITRARFEELCSDLFRGTLEPVEKALRDAKLDKAQIHDLVLVGGSTRIPKVQKLLQDFFN
GRDLNKSINPDEAVAYGAAVQAAILMGDKSENVQDLLLLDVAPLSLGLETAGGVMTALIKRNSTIPTKQTQ
TFTTYSDNQPGVLIQVYEGERAMTRDNNLLGRFELSGIPPAPRGVPQIEVTFDIDANGILNVTATDKSTGK
ANKITITNDKGRLSKEEIERMVQEAERYKAEDEVQRERVAAKNALESYAFNMKSAVEDEGLKGKISEADKK
KVLDKCQEVISWLDSNTLAEKEEFVHKREELERVCNPIISGLYQGAGAPGAGGFGAQAPKGGSGSGPTIEE
VD
Cattle HSPA1A Protein (NCBI Accession No. NP_976067.3)
(SEQ ID NO: 70)
MAKNMAIGIDLGTTYSCVGVFQHGKVEIIANDQGNRTTPSYVAFTDTERLIGDAAKNQVALNPQNTVFDAK
RLIGRKFGDPVVQSDMKHWPFRVINDGDKPKVQVSYKGETKAFYPEEISSMVLTKMKEIAEAYLGHPVTNA
VITVPAYFNDSQRQATKDAGVIAGLNVLRIINEPTAAAIAYGLDRTGKGERNVLIFDLGGGTFDVSILTID
DGIFEVKATAGDTHLGGEDFDNRLVNHFVEEFKRKHKKDISQNKRAVRRLRTACERAKRTLSSSTQASLEI
DSLFEGIDFYTSITRARFEELCSDLFRSTLEPVEKALRDAKLDKAQIHDLVLVGGSTRIPKVQKLLQDFFN
GRDLNKSINPDEAVAYGAAVQAAILMGDKSENVQDLLLLDVAPLSLGLETAGGVMTALIKRNSTIPTKQTQ
IFTTYSDNQPGVLIQVYEGERAMTRDNNLLGRFELSGIPPAPRGVPQIEVTFDIDANGILNVTATDKSTGK
ANKITITNDKGRLSKEEIERMVQEAEKYKAEDEVQRERVSAKNALESYAFNMKSAVEDEGLKGKISEADKK
KVLDKCQEVISWLDANTLAEKDEFEHKRKELEQVCNPIISRLYQGAGGPGAGGFGAQGPKGGSGSGPTIEE
VD
Human Mature HSPA1A Protein
(SEQ ID NO: 93)
AKAAAIGIDLGTTYSCVGVFQHGKVEIIANDQGNRTTPSYVAFTDTERLIGDAAKNQVALNPQNTVFDAKR
LIGRKFGDPVVQSDMKHWPFQVINDGDKPKVQVSYKGETKAFYPEEISSMVLTKMKEIAEAYLGYPVTNAV
ITVPAYFNDSQRQATKDAGVIAGLNVLRIINEPTAAAIAYGLDRTGKGERNVLIFDLGGGTFDVSILTIDD
GIFEVKATAGDTHLGGEDFDNRLVNHFVEEFKRKHKKDISQNKRAVRRLRTACERAKRTLSSSTQASLEID
SLFEGIDFYTSITRARFEELCSDLFRSTLEPVEKALRDAKLDKAQIHDLVLVGGSTRIPKVQKLLQDFFNG
RDLNKSINPDEAVAYGAAVQAAILMGDKSENVQDLLLLDVAPLSLGLETAGGVMTALIKRNSTIPTKQTQI
FTTYSDNQPGVLIQVYEGERAMTKDNNLLGRFELSGIPPAPRGVPQIEVTFDIDANGILNVTATDKSTGKA
NKITITNDKGRLSKEEIERMVQEAEKYKAEDEVQRERVSAKNALESYAFNMKSAVEDEGLKGKISEADKKK
VLDKCQEVISWLDANTLAEKDEFEHKRKELEQVCNPIISGLYQGAGGPGPGGFGAQGPKGGSGSGPTIEEV
D

[0190] A non-limiting example of a human wildtype NDP genomic DNA sequence is SEQ ID NO: 71.

| Human HSPA1A Gene Sequence(NCBI Reference Sequence NC_00000612) | |
|---|---|
| (SEQ ID NO: 71) | |
| 1 aacggctagc ctgaggagct gctgcgacag tccactacct ttttcgagag tgactcccgt | 61 |
| tgtcccaagg cttcccagag cgaacctgtg cggctgcagg caccggcgcg tcgagtttcc | 121 |
| ggcgtccgga aggaccgagc tcttctcgcg gatccagtgt tccgtttcca gcccccaatc | 181 |
| tcagagcgga gccgacagag agcagggaac cggcatggcc aaagccgcgg cgatcggcat | 241 |
| cgacctgggc accacctact cctgoitggg ggtgttccaa cacggcaagg tggagatcat | 301 |
| cgccaacgac cagggcaacc gcaccacccc cagctacgtg gccttcacgg acaccgagcg | 361 |
| gctcatcggg gatgojgcca agaaccaggt ggcgctgaac ccgcagaaca ccgtgtttga | 421 |
| cgcgaagcgg ctgattggcc gcaagttcgg cgaccoggtg gtgcagtojg acatgaagca | 481 |
| ctggcctttc caggtgatca acgacggaga caagcccaag gtgcaggtga gctacaaggg | 541 |
| ggagaccaag gcattctacc ccgaggagat ctcgtccatg gtgctgacca agatgaagga | 601 |
| gatcgccgag gcgtacctgg gctaccoggt gaccaacgcg gtgatcaccg tgccggccta | 661 |
| cttcaacgac tcgcagcgcc aggccaccaa ggatgojggt gtgatcgcgg ggctcaacgt | 721 |
| gctgcggatc atcaacgagc ccacggccgc cgccatcgcc tacggcctgg acagaacggg | 781 |
| caagggggag cgcaacgtgc tcatctttga cctgggcggg ggcaccttcg acgtgtccat | 841 |
| cctgacgatc gacgacggca tcttcgaggt gaaggccacg gccggggaca cccacctggg | 901 |
| tggggaggac tttgacaaca ggctggtgaa ccacttcgtg gaggagttca agagaaaaca | 961 |
| caagaaggac atcagccaga acaagcgagc cgtgaggcgg ctgcgcaccg cctgcgagag | 1021 |
| ggccaagagg accctgtcgt ccagcaccca ggccagcctg gagatcgact ccctgtttga | 1081 |
| gggcatcgac ttctacacgt ccatcaccag ggcgaggttc gaggagctgt gctccgacct | 1141 |
| gttccgaagc accctggagc ccgtggagaa ggctctgcgc gacgccaagc tggacaaggc | 1201 |
| ccagattcac gacctggtcc tggtoggggg ctccacccgc atccccaagg tgcagaagct | 1261 |
| gctgcaggac ttcttcaacg ggcgcgacct gaacaagagc atcaaccccg acgaggctgt | 1321 |
| ggcctacggg gojgcggtgc aggcggccat cctgatgggg gacaagtccg agaacgtgca | 1381 |
| ggacctgctg ctgctggacg tggctcccct gtcgcbgggg ctggagacgg ccggaggcgt | 1441 |
| gatgactgcc ctgatcaagc gcaactccac catccccacc aagcagacgc agatcttcac | 1501 |
| cacctactcc gacaaccaac cojgggtgct gatccaggtg tacgagggcg agagggccat | 1561 |
| gacgaaagac aacaatctgt tggggcgctt cgagctgagc ggcatccctc cggcccccag | 1621 |
| gggcgtgccc cagatcgagg tgaccttcga catcgatgcc aacggcatcc tgaacgtcac | 1681 |
| ggccacggac aagagcaccg gcaaggccaa caagatcacc atcaccaacg acaagggccg | 1741 |
| cctgagcaag gaggagatcg agcgcatggt gcaggaggcg gagaagtaca aagcggagga | 1801 |
| cgaggtgcag cgcgagaggg tgtcagccaa gaacgccctg gagtcctacg ccttcaacat | 1861 |
| gaagagcgcc gtggaggatg aggggctcaa gggcaagatc agcgaggcgg acaagaagaa | 1921 |
| ggtgctggac aagtgtcaag aggtcatctc gtggctggac gccaacacct tggccgagaa | 1981 |
| ggacgagttt gagcacaaga ggaaggagct ggagcaggtg tgtaacccca tcatcagcgg | 2041 |
| actgtaccag ggtgccggtg gtcccgggcc tgggggcttc ggggctcagg gtcccaaggg | 2101 |
| agggtctggg tcaggcccca ccattgagga ggtagattag gggcctttcc aagattgctg | 2161 |
| tttttgtttt ggagcttcaa gactttgcat ttcctagtat ttctgtttgt cagttctcaa | 2221 |
| tttcctgtgt ttgcaatgtt gaaatttttt ggtgaagtac tgaacttgct ttttttccgg | 2281 |
| tttctacatg cagagatgaa tttatactgc catcttacga ctatttcttc tttttaatac | 2341 |
| acttaactca ggccattttt taagttggtt acttcaaagt aaataaactt taaaattcaa | |

Human HSPA1A Gene Sequence
(SEQ ID NO: 94)
atgtaccggatgcagctgctgagctgtatcgccctgtctctggccctggtcaccaattctgccaaagccgc
ggcgatcggcatcgacctgggcaccacctactcctgcgtgggggtgttccaacacggcaaggtggagatca
tcgccaacgaccagggcaaccgcaccacccccagctacgtggccttcacggacaccgagcggctcatcggg
gatgcggccaagaaccaggtggcgctgaacccgcagaacaccgtgtttgacgcgaagcggctgatcggccg
caagttcggcgacccggtggtgcagtcggacatgaagcactggcctttccaggtgatcaacgacggagaca
agcccaaggtgcaggtgagctacaagggggagaccaaggcattctaccccgaggagatctcgtccatggtg
ctgaccaagatgaaggagatcgccgaggcgtacctgggctacccggtgaccaacgcggtgatcaccgtgcc
ggcctacttcaacgactcgcagcgccaggccaccaaggatgcgggtgtgatcgcggggctcaacgtgctgc
ggatcatcaacgagcccacggccgccgccatcgcctacggcctggacagaacgggcaagggggagcgcaac
gtgctcatctttgacctgggcgggggcaccttcgacgtgtccatcctgacgatcgacgacggcatcttcga
ggtgaaggccacggccggggacacccacctgggtggggaggactttgacaacaggctggtgaaccacttcg
tggaggagttcaagagaaaacacaagaaggacatcagccagaacaagcgagccgtgaggcggctgcgcacc
gcctgcgagagggccaagaggaccctgtcgtccagcacccaggccagcctggagatcgactccctgtttga
gggcatcgacttctacacgtccatcaccagggcgaggttcgaggagctgtgctccgacctgttccgaagca
ccctggagcccgtggagaaggctctgcgcgacgccaagctggacaaggcccagattcacgacctggtcctg
gtcgggggctccacccgcatccccaaggtgcagaagctgctgcaggacttcttcaacgggcgcgacctgaa
caagagcatcaaccccgacgaggctgtggcctacggggcggcggtgcaggcggccatcctgatgggggaca
agtccgagaacgtgcaggacctgctgctgctggacgtggctcccctgtcgctggggctggagacggccgga
ggcgtgatgactgccctgatcaagcgcaactccaccatccccaccaagcagacgcagatcttcaccaccta
ctccgacaaccaacccggggtgctgatccaggtgtacgagggcgagagggccatgacgaaagacaacaatc
tgttggggcgcttcgagctgagcggcatccctccggcccccaggggcgtgccccagatcgaggtgaccttc
gacatcgatgccaacggcatcctgaacgtcacggccacggacaagagcaccggcaaggccaacaagatcac
catcaccaacgacaagggccgcctgagcaaggaggagatcgagcgcatggtgcaggaggcggagaagtaca
aagcggaggacgaggtgcagcgcgagagggtgtcagccaagaacgccctggagtcctacgccttcaacatg
aagagcgccgtggaggatgaggggctcaagggcaagatcagcgaggcggacaagaagaaggttctggacaa
gtgtcaagaggtcatctcgtggctggacgccaacaccttggccgagaaggacgagtttgagcacaagagga
aggagctggagcaggtgtgtaaccccatcatcagcggactgtaccagggtgccggtggtcccgggcctggg
ggcttcggggctcagggtcccaagggagggtctgggtcaggccccaccattgaggaggtggattaa

### Vascular Endothelial Growth Factor (VEGF)

[0191] The VEGF gene encodes vascular endothelial growth factor (VEGF), formerly known as fms-like tyrosine kinase (Flt-1). The VEGF protein is a heparin-biding protein that induces migration and proliferation of vascular endothelial cells.

[0192] The human VEGF gene is located on chromosome 6p21. It contains 8 exons encompassing ˜16 kilobases (kb) (NCBI Accession No. NG_008732.1). The full-length wildtype VEGF protein expressed from the human VEGF gene is 412 amino acids in length.

[0193] An exemplary human wildtype VEGF protein is or includes the sequence of SEQ ID NO: 72, SEQ ID NO: 74, SEQ ID NO: 76, SEQ ID NO: 77, SEQ ID NO: 78, or SEQ ID NO: 79. Non-limiting examples of nucleic acid encoding a wildtype VEGF protein are or include SEQ ID NO: 73 and SEQ ID NO: 75.

[0194] Non-limiting examples of protein and nucleotide sequences encoding a wildtype VEGF protein are shown below.

Human VEGF Transcript Variant 1 Protein Sequence
(SEQ ID NO: 72)
MTDRQTDTAPSPSYHLLPGRRRTVDAAASRGQGPEPAPGGGVEGVGARGVALKLFVQLLGCSRFGGAVVRA
GEAEPSGAARSASSGREEPQPEEGEEEEEKEEERGPQWRLGARKPGSWTGEAAVCADSAPAARAPQALARA
SGRGGRVARRGAEESGPPHSPSRRGSASRAGPGRASETMNFLLSWVHWSLALLLYLHHAKWSQAAPMAEGG
GQNHHEVVKFMDVYQRSYCHPIETLVDIFQEYPDEIEYIFKPSCVPLMRCGGCCNDEGLECVPTEESNITM
QIMRIKPHQGQHIGEMSFLQHNKCECRPKKDRARQEKKSVRGKGKGQKRKRKKSRYKSWSVYVGARCCLMP
WSLPGPHPCGPCSERRKHLFVQDPQTCKCSCKNTDSRCKARQLELNERTCRCDKPRR
Human VEGF Transcript Variant 1 cDNA
(SEQ ID NO: 73)
ctgacqqacagacagacagacaccgccoccagocccagctaccacctcctcccoggccggcggcggacagt
ggacgcggcggcgagccgogggcaggggccggagoccgcgccoggaggcggggtggagggggtcggggctc
goggcgtcgcactgaaacttttcgtccaacttctgggctgttctcgcttoggaggagccgtggtccgcgcg
ggggaagccgagccgagoggagccgcgagaagtqctagctogggccgggaggagccgcagccggaggaggg
ggaggaggaagaagagaaggaagaggagagggggccgcagtggcgactoggcgctoggaagccgggctcat
ggacgggtgaggcggcggtgtgcgcagacagtgctccagccgcgcgcgctccccaggccctggcccgggcc
tcgggccggggaggaagagtagctcgccgaggcgccgaggagagcgggccgccccacagcccgagccggag
agggagcgcgagccgcgccggccccggtcgggcctccgaaaccatgaactttctgctgtcttgggtgcatt
ggagccttgccttgctgctctacctccaccatgccaagtggtcccaggctgcacccatggcagaaggagga
gggcagaatcatcacgaagtggtgaagttcatggatgtctatcagcgcagctactgccatccaatcgagac
cctggtggacatcttccaggagtaccctgatgagatcgagtacatcttcaagccatcctgtgtgcccctga
tgcgatgcgggggctgctgcaatgacgagggcctggagtgtgtgcccactgaggagtccaacatcaccatg
cagattatgcggatcaaacctcaccaaggccagcacataggagagatgagcttcctacagcacaacaaatg
tgaatgcagaccaaagaaagatagagcaagacaagaaaaaaaatcagttcgaggaaagggaaaggggcaaa
aacgaaagcgcaagaaatcccggtataagtcctggagcgtgtacgttggtgcccgctgctgtctaatgccc
tggagcctccctggcccccatccctgtgggccttgctcagagcggagaaagcatttgtttgtacaagatcc
gcagacgtgtaaatgttcctgcaaaaacacagactcgcgttgcaaggcgaggcagcttgagttaaacgaac
gtacttgcagatgtgacaagccgaggcggtga
Human VEGF Transcript Variant 3 Protein Sequence
(SEQ ID NO: 74)
MTDRQTDTAPSPSYHLLPGRRRTVDAAASRGQGPEPAPGGGVEGVGARGVALKLFVQLLGCSRFGGAVVRA
GEAEPSGAARSASSGREEPQPEEGEEEEEKEEERGPQWRLGARKPGSWTGEAAVCADSAPAARAPQALARA
SGRGGRVARRGAEESGPPHSPSRRGSASRAGPGRASETMNFLLSWVHWSLALLLYLHHAKWSQAAPMAEGG
GQNHHEVVKFMDVYQRSYCHPIETLVDIFQEYPDEIEYIFKPSCVPLMRCGGCCNDEGLECVPTEESNITM
QIMRIKPHQGQHIGEMSFLQHNKCECRPKKDRARQEKKSVRGKGKGQKRKRKKSRPCGPCSERRKHLFVQD
PQTCKCSCKNTDSRCKARQLELNERTCRCDKPRR
Human VEGF Transcript Variant 3 cDNA
(SEQ ID NO: 75)
ctgacggacagacagacagacaccgccoccagccccagctaccacctcctcccoggccggcggcggacagt
ggacgcggcggcgagccgcgggcaggggccggagcccgcgccoggaggcggggtggagggggtcggggctc
goggcgtcgcactgaaacttttcgtccaacttctgggctgttctcgcttcggaggagccgtggtccgcgcg
ggggaagccgagccgagoggagccgcgagaagtgctagctogggccgggaggagccgcagccggaggaggg
ggaggaggaagaagagaaggaagaggagagggggccgcagtggcgactoggcgctoggaagccgggctcat
ggacgggtgaggcggcggtgtgcgcagacagtgctccagccgcgcgcgctccccaggccctggcccgggcc
togggccggggaggaagagtagctcgccgaggcgccgaggagagogggccgccccacagcccgagccggag
agggagcgcgagccgcgccggcccoggtogggcctccgaaaccatgaactttctgctgtcttgggtgcatt
ggagccttgccttgctgctctacctccaccatgccaagtggtoccaggctgcacccatggcagaaggagga
gggcagaatcatcacgaagtggtgaagttcatggatgtctatcagcgcagctactgccatccaatcgagac
cctggtggacatcttccaggagtaccctgatgagatcgagtacatcttcaagccatcctgtgtgcccctga
tgcgatgogggggctgctgcaatgacgagggcctggagtgtgtgcccactgaggagtccaacatcaccatg
cagattatgoggatcaaacctcaccaaggccagcacataggagagatgagottcctacagcacaacaaatg
tgaatgcagaccaaagaaagatagagcaagacaagaaaaaaaatcagttcgaggaaagggaaaggggcaaa
aacgaaagcgcaagaaatcccgtocctgtgggccttgctcagagoggagaaagcatttgtttgtacaagat
ccgcagacgtgtaaatgttcctgcaaaaacacagactcgcgttgcaaggcgaggcagcttgagttaa
acgaacgtacttgcagatgtgacaagccgaggcggtga
Mature Human VEGF-A
(SEQ ID NO: 76)
APMAEGGGQNHHEVVKFMDVYQRSYCHPIETLVDIFQEYPDEIEYIFKPSCVPLMRCGGCCNDEGLECVPT
EESNITMQIMRIKPHQGQHIGEMSFLQHNKCECRPKKDRARQEKKSVRGKGKGQKRKRKKSRYKSWSVYVG
ARCCLMPWSLPGPHPCGPCSERRKHLFVQDPQTCKCSCKNTDSRCKARQLELNERTCRCDKPRR
Mature Human VEGF-B
(SEQ ID NO: 77)
PVSQPDAPGHQRKVVSWIDVYTRATCQPREVVVPLTVELMGTVAKQLVPSCVTVQRCGGCCPDDGLECVPT
GQHQVRMQILMIRYPSSQLGEMSLEEHSQCECRPKKKDSAVKPDRAATPHHRPQPRSVPGWDSAPGAPSPA
DITHPTPAPGPSAHAAPSTTSALTPGPAAAAADAAASSVAKGGA
Mature Human VEGF-C
(SEQ ID NO: 78)
AHYNTEILKSIDNEWRKTQCMPREVCIDVGKEFGVATNTFFKPPCVSVYRCGGCCNSEGLQCMNTSTSYLS
KTLFEITVPLSQGPKPVTISFANHTSCRCMSKLDVYRQVHSIIRR
Mature Human VEGF-D
(SEQ ID NO: 79)
FAATFYDIETLKVIDEEWQRTQCSPRETCVEVASELGKSTNTFFKPPCVNVFRCGGCCNEESLICMNTSTS
YISKQLFEISVPLTSVPELVPVKVANHTGCKCLPTAPRHPYSIIRR

[0195] In some embodiments of any of the compositions described herein, the VEGF protein comprises a sequence that is at least 75% (e.g., at least 80%, at least 85%, at least 90%, at least 91%, at least 92%, at least 93%, at least 94%, at least 95%, at least 96%, at least 97%, at least 98%, at least 99%) identical to SEQ ID NO: 72.

[0196] In some embodiments of any of the compositions described herein, the VEGF protein comprises a sequence that is at least 75% (e.g., at least 80%, at least 85%, at least 90%, at least 91%, at least 92%, at least 93%, at least 94%, at least 95%, at least 96%, at least 97%, at least 98%, at least 99%) identical to SEQ ID NO: 74.

[0197] In some embodiments of any of the compositions described herein, the VEGF protein comprises a sequence that is at least 75% (e.g., at least 80%, at least 85%, at least 90%, at least 91%, at least 92%, at least 93%, at least 94%, at least 95%, at least 96%, at least 97%, at least 98%, at least 99%) identical to SEQ ID NO: 76.

[0198] In some embodiments of any of the compositions described herein, the VEGF protein comprises a sequence that is at least 75% (e.g., at least 80%, at least 85%, at least 90%, at least 91%, at least 92%, at least 93%, at least 94%, at least 95%, at least 96%, at least 97%, at least 98%, at least 99%) identical to SEQ ID NO: 77.

[0199] In some embodiments of any of the compositions described herein, the VEGF protein comprises a sequence that is at least 75% (e.g., at least 80%, at least 85%, at least 90%, at least 91%, at least 92%, at least 93%, at least 94%, at least 95%, at least 96%, at least 97%, at least 98%, at least 99%) identical to SEQ ID NO: 78.

[0200] In some embodiments of any of the compositions described herein, the VEGF protein comprises a sequence that is at least 75% (e.g., at least 80%, at least 85%, at least 90%, at least 91%, at least 92%, at least 93%, at least 94%, at least 95%, at least 96%, at least 97%, at least 98%, at least 99%) identical to SEQ ID NO: 79.

[0201] A non-limiting example of a human wildtype VEGF genomic DNA sequence is SEQ ID NO: 80. The exons in SEQ ID NO: 80 are: nucleotide positions 1-1104 (exon 1); nucleotide positions 4133-4184 (exon 2) and nucleotide positions 7261-7457 (exon 3); nucleotide positions 8252-8328 (exon 4); nucleotide positions 8681-8710 (exon 5); nucleotide positions 10524-10646 (exon 6); nucleotide positions 11748-11879 (exon 7); and nucleotide positions 14333-16279 (exon 8). The introns in SEQ ID NO: 80 are: nucleotide positions 1105-4132 (intron 1); nucleotide positions 4185-7260 (intron 2); nucleotide positions 7458-8251 (intron 3); nucleotide positions 8329-8680 (intron 4); nucleotide positions 8711-10523 (intron 5); nucleotide positions 10647-11747 (intron 6); and nucleotide positions 11880-14332 (intron 7).

| Human VEGF-A Gene (NCBI Accession No.NG_008732.1) | |
|---|---|
| (SEQ ID NO: 80) | |
| 1 | cgcctgtaat cccagcactc tgggaggcag aggtgggccg atcacttgag gtcaggagtt |
| 61 | cgagaccagc ctgggcaaca tggtgaaaca ccatctctac taaaaacaca aaaattagcc |
| 121 | aggtgtggtg gcaggcacct gcagtcccag ctactccgga ggctgaggca ggagaattgc |
| 181 | tcgaacctgg gaggcagggg ttgcagtgag ccgacatggc gccactgcac tccagtctgg |
| 241 | gcgacagagt gagaccctat ctcaaaaaaa aaaaaaaaaa aaaaagaccc aactcaagta |
| 301 | tcatctccag gaagccttcc cctactccca gcaattaaat gctcctcaga gaattcccat |
| 361 | ttttggttta ctotttggtt tacctccaga caggaagocc ccactgacac tgttgtagtc |
| 421 | ccagggtgca acacaaagca gagatcacaa gctgagttta ataattgctt gtggaataca |
| 481 | tgtcccaagc cacctcctgc aggaagccct tccagatgcc cattctagcc agtctggctc |
| 541 | tttgcttcca taccttcaca acacttgtgc ctcccccagg gcctctttct catcttgctt |
| 601 | tctggggcag ctgtgtgcac atttgtctgt gtgcagcaac tctctaaggc agggattttt |
| 661 | actcctattt ttgatgaggg gagctgtggc tcagagaggt tgaataacct aaggccacac |
| 721 | agtgagtggc agagccagga atgtgacttg ggtccatttg aatccaaagt ccctgtactt |
| 781 | tccactgccc tacctagatg tccctgtacc tcctataaaa tcagcatgga gcctggtgcc |
| 841 | tggtagtccc tacaaatatt cacaaattgg agcttagctc agctctcagg caaggcccag |
| 901 | gtcaaaaggg cagatacagc tttgggacct tagttgccac cacatgccat accttcttcc |
| 961 | cagcagaagg actccctcca agacagggta ggggtggagg atgtgaacag gggcagaaat |
| 1021 | gggcatgttt tggggtcaga cttggaggaa tagcagagat tggagtgtca gaaggtgagc |
| 1081 | atgcctgggg gtgttgggga gatgcaattc atcagggaca gcttagtgtc aggggattag |
| 1141 | actggggccc atgaaggaga ggcagaggct gatgggccta ggggtggtgt gggtaggtga |
| 1201 | gcttccccag acagtgactc tgccctgccc tctctccagc taggtcctct tccccattcc |
| 1261 | ttcccccttt cctgactgga tcctcttggg agagttaccc tccttggctt cctctgctcc |
| 1321 | aatcttttta tcagttggcc atcattactt atcattacct caagtcaaac ctccagatcc |
| 1381 | acatggggct aggacattgg cactggacca aagaggccct ttcctttgct ttctctttgt |
| 1441 | ctttttaatg cttbittgca aagacctagg cggggagaga gagagagaga gagagacaga |
| 1501 | gattgaccca cagtcagggt cagggaattg aggggaacca acccaattct ctctccttca |
| 1561 | attcaccagg tttgtatcct gcccttcctg cagatcagtg tcctgctagt cacctggggg |
| 1621 | tcaggggatg gagtgaagga caagacctcc ttccattgca gtgaagccac ttggagaaat |
| 1681 | gtgtggaaaa cagcaagacc cagtgactct ctcctcacct tctttccaat ctcaggagag |
| 1741 | attttgtccc ttcatccacc ggcttctaga ttaaccaccc acacccacac aggcgagagt |
| 1801 | ttccctgaat attggaggtg acaggacatc aggacaaagt acaactattg tgccttggcc |
| 1861 | caatcactac tttctttgtc tggggccgcc gctggctcct ggctgccttt cgcacttttc |
| 1921 | tccaccccca cccctttctc cccttccccc tcacctggaa caccttcccc ttcctccttg |
| 1981 | gctccttctg aactgccttc agagccacag actgbjggga gtggccactg cgctcccaag |
| 2041 | gtgaggccct ccaagojggg ccgagtttgc ccctcaactg ggagccagca tgacctctgt |
| 2101 | gtgggctgct ctctgcttca ctgccccttc ccccaatctg ctaggtgacc ctgggcccct |
| 2161 | ttgtgccctc tctgggcctt cggaggattc tttggggaga cagtctgctc tgacgcccct |
| 2221 | tcccctgcag caagcagcct ggggagggag gtgaggataa gtgaagtcaa gttgttcagg |
| 2281 | gggctaagcc catggaaggg aagatgccac agagatacat gtggtcttgt gattgttgtt |
| 2341 | ttgtgctttt tccccttttt tgaaagctca ggtgactagg tgacttgagc ttttaatttg |
| 2401 | gtgacaatgt gggcactggc tgagtcctta agagtacatt gttgtaaatg ccggtgacaa |
| 2461 | cacactgggg catgggatcc agagttaacc cctccaggtc acagccaggt tatatctcca |
| 2521 | caatgaaggg gggaggtggg ccatactttc tcgccctaat gaaggtagct caaaaacccc |
| 2581 | taggccaggt tgtaatccta gccttatata aaaggaattc tgtgccctca ctcccctgga |
| 2641 | tccctgggca aagccccaga gggaaacaca aacaggttgt tgtaacacac cttgctgggt |
| 2701 | accaccatgg aggacagttg gcttatgggg gtggggggtg cctggggcca cggagtgact |
| 2761 | ggtgatggct atccctcctt ggaacccctc cagcctcctc ttagcttcag atttgtttat |
| 2821 | ttgtttttta ctaagacctg ctctttcagg tctgttggct cttttagggg ctgaagaagg |
| 2881 | ccgagttgag aagggatgca agggaggggg ccagaatgag cccttagggc tcagagcctc |
| 2941 | catcctgccc caagatgtct acagcttgtg ctcctggggt gctagaggcg cacaaggagg |
| 3001 | aaagttagtg gcttcccttc catatcccgt tcatcagcct agagcatgga gcccaggtga |
| 3061 | ggaggcctgc ctgggagggg gccctgagcc aggaaataaa catttactaa ctgtacaaag |
| 3121 | accttgtccc tgctgcbggg gagcctgcca agtggtggag acaggactag tgcacgaatg |
| 3181 | atggaaaggg agggttgggg tgggtgggag ccagcccttt tcctcataag ggccttagga |
| 3241 | caccataccg atggaactgg gggtactggg gaggtaacct agcacctcca ccaaaccaca |
| 3301 | gcaacatgtg ctgaggatgg ggctgactag gtaagctccc tggagcgttt tggttaaatt |
| 3361 | gagggaaatt gctgcattcc cattctcagt ccatgcctcc acagaggcta tgccagctgt |
| 3421 | aggccagacc ctggcaagat ctgggtggat aatcagactg actggtccca ctcttcccac |
| 3481 | aggcctcaga gccccaactt tgttccctgg ggcagcctgg aaatagccag gtcagaaacc |
| 3541 | agctaggaat ttttccaagc tgcttcctat atgcaagaat gggatggggc ctttgggagc |
| 3601 | acttagggaa gatgtggaga gttggaggaa aagggggctt ggaggtaagg gaggggactg |
| 3661 | ggggaaggat aggggagaag ctgtgagcct ggagaagtag ccaagggatc ctgagggaat |
| 3721 | gggggagctg agacgaaacc cccatttcta ttcagaagat gagctatgag tctgggcttg |
| 3781 | ggctgataga agccttggcc cctggcctgg tgggagctct gggcagctgg cctacagacg |
| 3841 | ttccttagtg ctggcgggta ggtttgaatc atcacgcagg ccctggcctc cacccgcccc |
| 3901 | caccagcccc ctggcctcag ttccctggca acatctgggg ttgggggggc agcaggaaca |
| 3961 | agggcctctg tctgcccagc tgcctccccc tttgggtttt gccagactcc acagtgcata |
| 4021 | cgtgggctcc aacaggtcct cttccctccc agtcactgac taaccccgga accacacagc |
| 4081 | ttcccgttct cagctccaca aacttggtgc caaattcttc tcccctggga agcatccctg |
| 4141 | gacacttccc aaaggacccc agtcactcca gcctgttggc tgccgctcac tttgatgtct |
| 4201 | gcaggccaga tgagggctcc agatggcaca ttgtcagagg gacacactgt ggcccctgtg |
| 4261 | cccagccctg ggctctctgt acatgaagca actccagtcc caaatatgta gctgtttggg |
| 4321 | aggtcagaaa tagggggtcc aggagcaaac tccccccacc ccctttccaa agcccattcc |
| 4381 | ctctttagcc agagccgggg tgtgcagacg gcagtcacta gggggcgctc ggccaccaca |
| 4441 | gggaagctgg gtgaatggag cgagcagcgt cttcgagagt gaggacgtgt gtgtctgtgt |
| 4501 | gggtgagtga gtgtgtgcgt gtggggttga gggcgttgga gcjgggagaa ggccaggggt |
| 4561 | cactccagga ttccaataga tctgtgtgtc cctctcccca cccgtccctg tccggctctc |
| 4621 | cgccttcccc tgcccccttc aatattccta gcaaagaggg aacggctctc aggccctgtc |
| 4681 | cgcacgtaac ctcactttcc tgctccctcc tcgccaatgc cccgcgggcg cgtgtctctg |
| 4741 | gacagagttt cogggggcgg atgggtaatt ttcaggctgt gaaccttggt gggggtcgag |
| 4801 | cttccccttc attgojgcgg gctgcgggcc aggcttcact gagcgtccgc agagcccggg |
| 4861 | cccgagccgc gtgtggaagg gctgaggctc gcctgtcccc gccccccggg gcgggccggg |
| 4921 | ggcggggtcc cggcggggcg gagccatgcg cccccccctt ttttttttaa aagtcggctg |
| 4981 | gtagojggga ggatcgcgga ggcttggggc agccgggtag ctcggaggtc gtggcgctgg |
| 5041 | gggctagcac cagcgctctg tcgggaggcg cagcggttag gtggaccggt cagcggactc |
| 5101 | accggccagg gcgctoggtg ctggaatttg atattcattg atccgggttt tatccctctt |
| 5161 | cttttttctt aaacattttt ttttaaaact gtattgtttc tcgttttaat ttatttttgc |
| 5221 | ttgccattcc ccacttgaat cgggccgacg gcttggggag attgctctac ttccccaaat |
| 5281 | cactgtggat tttggaaacc agcagaaaga ggaaagaggt agcaagagct ccagagagaa |
| 5341 | gtcgaggaag agagagacgg ggtcagagag agcgcgcggg cgtgcgagca gcgaaagcga |
| 5401 | caggggcaaa gtgagtgacc tgcttttggg ggtgaccgcc ggagcgcggc gtgagccctc |
| 5461 | ccccttggga tcccgcagct gaccagtcgc gctgacggac agacagacag acaccgcccc |
| 5521 | cagccccagc taccacctcc tcccojgccg gcggcggaca gtggacgcgg cggcgagccg |
| 5581 | cgggcagggg ccggagcccg cgcccggagg cggggtggag ggggtcgggg ctcgcggcgt |
| 5641 | cgcactgaaa cttttcgtcc aacttctggg ctgttctcgc ttcggaggag ccgtggtccg |
| 5701 | cgcgggggaa gccgagccga gcggagccgc gagaagtgct agctcgggcc gggaggagcc |
| 5761 | gcagccggag gagggggagg aggaagaaga gaaggaagag gagagggggc cgcagtggcg |
| 5821 | actojgcgct cggaagccgg gctcatggac gggtgaggcg gcggtgtgcg cagacagtgc |
| 5881 | tccagccgcg cgcgctcccc aggccctggc cojggcctcg ggccggggag gaagagtagc |
| 5941 | tcgccgaggc gccgaggaga gojggccgcc ccacagcccg agccggagag ggagcgcgag |
| 6001 | ccgcgccggc ccoggtojgg cctccgaaac catgaacttt ctgctgtctt gggtgcattg |
| 6061 | gagccttgcc ttgctgctct acctccacca tgccaaggta agoggtcgtg ccctgctggc |
| 6121 | gccgcgggcc gctgcgagcg cctctccogg ctggggacgt gcgtgcgagc gcgcgcgtgg |
| 6181 | gggctccgtg ccccacgcgg gtccatgggc accaggcgtg cggcgtcccc ctctgtcgtc |
| 6241 | ttaggtgcag ggggaggggg cgcgcgcgct aggtgggagg gtacccggag agaggctcac |
| 6301 | cgcccacgcg ggccctgccc acccaccgga gtcaccgcac gtacgatctg ggccgaccag |
| 6361 | ccgagggcgg gagccggagg aggaggccga gggggcbggg cttgcgttgc cgctgccggc |
| 6421 | tgaagtttgc tccojgccgc tggtccogga cgaactggaa gtctgagcag cgggggcggg |
| 6481 | agccagagac cagtgggcag ggggtgctcg gaccttggac cgcgggaggg cagagagcgt |
| 6541 | ggagggggca gggcgcagga gggagagggg gcttgctgtc actgccactc ggtctcttca |
| 6601 | gccctcgccg cgagtttggg aaaagttttg gggtggattg ctgoggggac cccccctccc |
| 6661 | tgctgggcca cctgcgccgc gccaaccccg ccoitccccg ctcgcgtccc gctcggtgcc |
| 6721 | cgccctcccc cgccojgccg ggtgcgcgcg gcgcggagcc gattacatca gcccgggcct |
| 6781 | ggccggccgc gtgttcccgg agcctcggct gcccgaatgg ggagcccaga gtggcgagcg |
| 6841 | gcacccctcc ccccgccagc cctccgcggg aaggtgacct ctcgaggtag ccccagcccg |
| 6901 | gggatccaga gaaccatccc taccccttcc tactgtctcc agaccctacc tctgcccagt |
| 6961 | gctaggagga atttcctgac gccccttctc ttcacccatt tcctttttag cctggagaga |
| 7021 | agcccctgtc accccgctta ttttcatttc tctctgcgga gaagatccat ctaacccctt |
| 7081 | tctggcccca gagtccaggg aaaggatgat cactgtcaga agtcgtggcg cgggagccca |
| 7141 | ctgggcgctt tgtcacattc caccgaaagt cccgacttgg tgacagtgtg cttcccttcc |
| 7201 | ctcgccaaca gttccgagtg agcbitgott tagctotcgt gggggtgggt caagggagga |
| 7261 | tttgaagagt cattgcccca ctttaccctt ttggagaaat ggcttgaaat ttgctgtgac |
| 7321 | acgggcagca tgggaatagt ccttcctgaa ccctggaaag gagctcctgc cagccttgca |
| 7381 | cacactttgt cctggtgaaa ggcagccctg gagcaggtgt ttttttggaa ctccaaacct |
| 7441 | gcccacccaa cttgcttctg aaagggactc taaagggtcc ctttccgctc ctctctgacg |
| 7501 | ccttccctca gccagaattc ccttggagag gaggcaagag gaaagccatg gacaggggtc |
| 7561 | gctgctaaca ccgcaagttc ctcagaccct ggcacaaagg ccttggctac aggcctccaa |
| 7621 | gtagggagga gggggaggag tggctgcctg gccacagtgt gaccttcaga ggcccccaga |
| 7681 | gaaggacacc tggcccctgc ctgcctagaa ccgcccctcc tgtgctccct ggccttggaa |
| 7741 | ggggtatgaa atttccgtcc cctttcctcc ttggggccca ggaggagtgg agggtcccgg |
| 7801 | gagaatattg tcagggggaa ggcagggggt gtcatgggaa tgggtgaggg ggctgaggtg |
| 7861 | cagaatccag ggggtccctg caggagccgc agtggtaagc tgtccagctg gaagcctggt |
| 7921 | aactgtbitt ttctcttgag aggggcttcc tgtgaccttg gctgtctctg ggagcagggc |
| 7981 | tggggtacct gagtggggtg catttggggt gtttgggaag gagagggaaa gaaagatgga |
| 8041 | cagtgggact ctcccctagc agggtctggt gttccgtagg ctagagtgcc cctctgctct |
| 8101 | gcgagtgctg ggcgggaggg gagttggtga gagctggaga cccccaggaa gggctggcag |
| 8161 | aagcctttcc ttttgggtgc bitcaggtcc gcatgtcttg gcttgttgac cttcacagct |
| 8221 | tctggcgagg ggaggaatga tctgatgcgg gtggggaggg ttagaggagg cctcaggcct |
| 8281 | aaggtggtgc agggggcccc ctaggggctg ggcagtgcca aggcataaaa gccttccctg |
| 8341 | gtccctggtg gcatttgaag gtgcccaggt gagaggggct tggcacctcc tcaccctggg |
| 8401 | agggagaaga aaccagggaa caggtaggag tgggagacag gtgaggcttt ggaaatctat |
| 8461 | tgaggctctg gagagatttg tgtagagagg aaaatgtggt tctcccccag ggtctcctcc |
| 8521 | tgggttttta ccctctaagc aacctgtggg catgcbjggt tattcctaag gactagaaga |
| 8581 | gcttggatgg gggagggtgg ttggtgccct toggtcctcg gcacccccct ccgtctccaa |
| 8641 | caccagctca ccctggtatt tttcatgtca gcaggagaag gtcaccatgt tgtttttctc |
| 8701 | gcccctagtc cttccttcct gccccagtcc aaatttgtcc tcctatttga ccttaatact |
| 8761 | taccatggct ttggaccagg gaactagggg gatagtgaga gcagggagag ggaagtgtgg |
| 8821 | ggaaggtaca ggggacctcg acagtgaagc attctggggt tttcctcctg catttcgagc |
| 8881 | tccccagccc ccaacatctg gttagtcttt aacttcctcg ggttcataac catagcagtc |
| 8941 | caggagtggt gggcatattc tttgcccgtg gggacccccg gttgtgtcct gttcgactca |
| 9001 | gaagacttgg agaagccaga ggctgttggt gggagggaag tgaggaggga ggaggggctg |
| 9061 | ggtggcbggg cctgtgcacc ccagcccctg cccatgccca tgccttgctc tctttctgtc |
| 9121 | ctcagtggtc ccaggctgca cccatggcag aaggaggagg gcagaatcat cacgaaggtg |
| 9181 | agtccccctg gcbgttggat ggggttccct gtcctctcag gggatgggtg gatggcctaa |
| 9241 | ttcctttttc ttcagaactg tggggaggaa ggggaagggg cacaggaata taaggatcaa |
| 9301 | gaaagaaaga gcbjggcacc acgaggttca ccctcagttt cgtgaggact ctccgctgtt |
| 9361 | caggtctctg ctagaagtag gacttgttgc ctttttcttc tgctctttcc agtaaaattt |
| 9421 | tatttggaga aggagtcgtg cgcacagagc aggaagacag tgttcaggga tcctaggtgt |
| 9481 | tgggggaagt gtcccttgtt tcccotagct cccaggggag agtggacatt tagtgtcatt |
| 9541 | tcctatatag acatgtccca tttgtgggaa ctgtgaccct tcctgtgtga gctggaggca |
| 9601 | cagagggctc agcctaatgg gatctctcct cccttccctg gtttgcattc ctttgggggt |
| 9661 | ggagaaaacc ccatttgact atgttcgggt gctgtgaact tccctcccag gccagcagag |
| 9721 | ggctggctgt agctcccagg cgccccgccc ccctgcccaa ccccgagtcc gcctgccttt |
| 9781 | bittccgttg tggtttggat cctcccattt ctctggggac accctggctc tccccaccac |
| 9841 | tgactgtggc ctgtgctctc cacctctggg gagggaaggc cctggggtct tccttcccgc |
| 9901 | gagtttccct gacctaaatc tggcgtggct gggtagtggc cagcagtggt gatgcccagc |
| 9961 | ctgttctgcc tcctccttcc ccaccccagg agccctttcc ttggcctagg acctggcttc |
| 10021 | tcagccactg accggccccc tgcttccagt gcgccactta ccccttccag cttcccagtg |
| 10081 | gtctctggtc tgggagaggc aggacaaagg tctttgtttg ctggagaaaa ggttgtctgc |
| 10141 | gataaataag gaaaaccacg aaagcctggt bittggagtg tacgtgtgtg ctcccccagg |
| 10201 | cagtggaggc cagccctcct tggaggggcg gctgcctgat gaaggatgcg ggtgaggttc |
| 10261 | cccgcctcca cctcccatgg gacttgggga ttcattccaa ggggaagctt tttgggggaa |
| 10321 | ttcctacccc aggtcttttt accctcagtt accaacccct tgcccaggcc agaccttcct |
| 10381 | gctatcccct cctgggccac aagcctggcc ctcctctgtc ccaattgtga tgaaggggca |
| 10441 | gttcaaaact tcttgattag tcatcttctc ccctatcgac ttggctttaa aaaatgacct |
| 10501 | tttcagactt ctagtctcgt tcactctttt tgatgatgct ttgccgtaac ccttcgtggg |
| 10561 | tagagaagga ttctgtgccc attggtggtc tggataaaag aaatagagac ctcacaggaa |
| 10621 | gcagtggact ggcctgtttc cccactgttc tttctgtttt cacacctgtg gccttctccc |
| 10681 | caccttcttc ccaatcaacc tattgtgtac atagcccccc tcattgtcct ttattcttct |
| 10741 | ggaaagcaga ccttggaggg aggagtgagg gggaggctca gcbgtggtct ctggggggtg |
| 10801 | ggggttggga gcbggggtgg aagtccacga agcatacact taagatgctt tggtgaagtt |
| 10861 | ctaaacttca tattacccag gctgaaaaaa gagcacttgt tcctagggct ggaaatggaa |
| 10921 | gccaaaacac cacctttttc agcctgtttc agcatcttta gagatcagcc caacccactt |
| 10981 | acacagttga gcagagttgg aggcctagag aggggaggga ctggcccaag gtcataccaa |
| 11041 | ctcatggcca gagcctgggc ctcctcactg gccaggtgtt atttcttccc tctgggtagg |
| 11101 | gaacctattt cagggacagg attgctatgt ggtagtggtg gtggggtgcg ataggcgtgg |
| 11161 | caggcbjggc cacaatttgg agtagtcatg ccagagtcct gcatttattt attctcaagg |
| 11221 | gccccgcctc tgtggcccag aattacccct tcatgctcca gtgcacccca ggcttcgtgg |
| 11281 | ccagcctggg aaactgtctc taccctggtc tcccttcaga tcagcttcta gaaatgtttc |
| 11341 | gtggctacag tggcagcact gttttttcca tgatgcaagc agtttgccct cttgggcggg |
| 11401 | gttatcagtg gctggcaggg ctggcacagc gtgtccgccc actgccacct gtgggttcca |
| 11461 | ggagggccca gcccctgtgc tgatgcccac caccttctca gctcatgtct ggggaagagg |
| 11521 | actggcaggg ggaaaggtgc ctcctcctga aaggtgcctc ctctgttttt gcctaatata |
| 11581 | ggcttgggaa cactttgatg tcagctaatt ctgactcctt tacttactag ctgtgcggcc |
| 11641 | ttggggcaac ttacttagcc tctttgagcc tcctgttccc catctgtaaa atggaatctc |
| 11701 | aatagtgtct aatagtacca tgtggagaaa cttgtgtgaa atgatagctg tggactactg |
| 11761 | tacacagtac tcaggatgta gtaagtgctc aataaacagc bittggtatg gttgacgtta |
| 11821 | tggtagtggt tgtggggagg acgtaggaaa ctggagacta gcttggcaaa gctggctctt |
| 11881 | cctcctttta gggaaagctt agagcatccc catggggtat acccatactc agactgtcct |
| 11941 | ctggcatcga ggttggccca ggattcagtt cagcbgtcac agtgaggtgg cgggatcaga |
| 12001 | tgtggcaggc catgtccctt ggaacttgag tacatcgtgt gatctctgga atgaaaacag |
| 12061 | gccttcacca gtgttgatgg tggaaagctt agggaagtgc ttcaaacaca gtaggaggga |
| 12121 | cttacgttag attttggaag gacttgcctg attcggaagc tccaaagagt ggcattacag |
| 12181 | agcbjggtgg agagaggggc tagccatctt ttgtgtcgcc caccgggctc atgtgtcatc |
| 12241 | gcctctcatg cagtggtgaa gttcatggat gtctatcagc gcagctactg ccatccaatc |
| 12301 | gagaccctgg tggacatctt ccaggagtac cctgatgaga tcgagtacat cttcaagcca |
| 12361 | tcctgtgtgc ccctgatgcg atgojggggc tgctgcaatg acgagggcct ggagtgtgtg |
| 12421 | cccactgagg agtccaacat caccatgcag gtgggcatct ttgggaagtg gggcaagggg |
| 12481 | gggataggga ggggggtaac actttgggaa caggtggtcc caggtcgttt cctggctaga |
| 12541 | tttgccttgt ctggctcctg cccctgagtt gcacagggga ggtatggtgg ggtcttgcct |
| 12601 | tctgtggaga agatgcttca ttcccagccc aggttcccag caagccccaa ccatctcctt |
| 12661 | ctccctgatg gttgcccatg ggctcaggag gggacagatg gatgcctgtg tcaggagccc |
| 12721 | ctctctccct ctcttggaga gagtcctgag tgccccccct tcttgggggc tttgtttggg |
| 12781 | aagctggatg agcctggtcc atggagagtt taaaaagtct tttggtgtta cctggtaatg |
| 12841 | gggcacatct cagcccagat agggtgggag ggagctgtga aacacaggga gggggttgct |
| 12901 | ttcgggtatc tactaggagt cagggtgaag cctagagagg atgaaagaag gggaggggat |
| 12961 | ggggagtggt aagaacctag gatttgaatt cccagcctgg ccaacccttg cagccatgtc |
| 13021 | ttggcctcaa gtggaacaag ggctccttga ggccagcagg gttgggggag ttggggtggg |
| 13081 | cctgagcctc tttcctgcta gagctcttgg tcctccctgc ctccaccacc catccctgct |
| 13141 | ctgcagaacc cctgggtgct gagtggcagg agccccaggg ttgtcccatc tgggtatggc |
| 13201 | tggcbgggtc actaacctct gtgatctgct tccttccttt ccagattatg cggatcaaac |
| 13261 | ctcaccaagg ccagcacata ggagagatga gcttcctaca gcacaacaaa tgtgaatgca |
| 13321 | ggtgaggatg tagtcacgga ttcattatca gcaagtggct gcagggtgcc tgatctgtgc |
| 13381 | cagggttaag catgctgtac tttttggccc ccgtccagct tcccgctatg tgacctttgg |
| 13441 | cattttactt caatgtgcct cagtttctac atctgtaaaa tgggcacaat agtagtatac |
| 13501 | ttcatagcat tgttataatg attaaacaag ttatatatga aaagattaaa acagtgttgc |
| 13561 | tccataataa atgcbgtttt tactgtgatt attattgttg ttatccctat cattatcatc |
| 13621 | accatcttaa cccttccctg ttttgctctt ttctctctcc ctacccattg cagaccaaag |
| 13681 | aaagatagag caagacaaga aaagtaagtg gccctgactt tagcacttct ccctctccat |
| 13741 | ggccggttgt cttggtttgg ggctcttggc tacctctgtt gggggctccc atagcctccc |
| 13801 | tgggtcaggg acttggtctt gtgggggact tgtggtggca gcaacaatgg gatggagcca |
| 13861 | actccaggat gatggctcta gggctagtga gaaaacatag ccaggagcct ggcacttcct |
| 13921 | ttggaaggga caatgccttc tgggtctcca gatcattcct gaccaggact tgctgtttcg |
| 13981 | gtgtgtcagg gggcactgtg gacactggct cactggcttg ctctaggaca cccacagtgg |
| 14041 | ggagagggag tgggtggcag agaggccagc ttttgtgtgt cagaggaaat ggcctctttt |
| 14101 | ggtggctgct gtgacggtgc agttggatgc gaggccggct ggagggtggt ttctcagtgc |
| 14161 | atgccctcct gtaggcggca ggcggcagac acacagccct cttggccagg gagaaaaagt |
| 14221 | tgaatgttgg tcattttcag aggcttgtga gtgctccgtg ttaaggggca ggtaggatgg |
| 14281 | ggtgggggac aaggtctggc ggcagtaacc cttcaagaca gggtgggcgg ctggcatcag |
| 14341 | caagagcttg cagggaaaga gagactgaga gagagcacct gtgccctgcc ctttccccca |
| 14401 | caccatcttg tctgcctcca gtgcbgtgcg gacattgaag cccccaccag gcctcaaccc |
| 14461 | cttgcctctt ccctcagctc ccagcttcca gagcgagggg atgcggaaac cttccttcca |
| 14521 | ccctttggtg ctttctccta agggggacag acttgccctc tctggtccct tctccccctc |
| 14581 | ctttcttccc tgtgacagac atcctgaggt gtgttctctt gggcttggca ggcatggaga |
| 14641 | gctctggttc tcttgaaggg gacaggctac agcctgcccc ccttcctgtt tccccaaatg |
| 14701 | actgctctgc catggggaga gtagggggct cgcctgggct cggaagagtg tctggtgaga |
| 14761 | tggtgtagca ggctttgaca ggcbjgggag agaactccct gccaagtacc gcccaagcct |
| 14821 | ctcctcccca gacctcctta actcccaccc catcctgctg cctgcccagg gctccaggac |
| 14881 | acccagccct gcctcccagt ccaggtcgtg ctgagcaggc tggtgttgct cttggttccg |
| 14941 | tgccagctcc caaggtagcc gcttccccca caccgggatt cccagaggtt ctgtcgcagt |
| 15001 | tgcaaatgaa ggcacaaggc ctgatacaca gccctccctc ccactcctgc tccccatcca |
| 15061 | ggcaggtctc tgaccttctc cccaaagtct ggcctacctt ttatcacccc cggaccttca |
| 15121 | gggtcagact tggacagggc tgctgggcaa agagccttcc ctcaggcttt gccccctgcc |
| 15181 | ggggactggg agccactgtg agtgtggaga cctttgggtc ctgtgccctc cacccagtct |
| 15241 | cggcttccca ccaaagcctt gtcaggggct gggtttgcca tcccatggtg ggcagcgtga |
| 15301 | ggagaagaaa gagccatcga gtgcttgctg cccagacacg cctgtgtgcg cccgcgcatg |
| 15361 | cctccccaga gaccacctgc ctcctgacac ttcctccggg aagojgccct gtgtggcttt |
| 15421 | gctttggtog ttcccccatc cctgcccacc ttaccacttc ttttactccc cccaccgccc |
| 15481 | ccgctctctc tctgtctctg tttttttatt ttccagaaaa tcagttcgag gaaagggaaa |
| 15541 | ggggcaaaaa cgaaagcgca agaaatcccg gtataagtcc tggagcgtgt acgttggtgc |
| 15601 | ccgctgctgt ctaatgccct ggagcctccc tggcccccag tacaacctcc gcctgccatt |
| 15661 | ccctgtaacc ctgcctccct cccctggtcc ttccctggct ctcatcctcc tggcccgtgt |
| 15721 | ctctctctca ctctctcact ccactaattg gcaccaacgg gtagatttgg tggtggcatt |
| 15781 | gctggtccag ggttggggtg aatgggggtg ccgacttggc ctggaggatt aagggagggg |
| 15841 | accctggctt ggcbjggcac cgattttctc tcacccactg ggcactggtg gcgggcccat |
| 15901 | gttggcacag gtgcctgctc acccaactgg tttccattgc tctaggcttc tgcactcgtc |
| 15961 | tggaagctga gggtggtggg gagggcagac atggcccaag aagggcbgtg aatgactgga |
| 16021 | ggcagcttgc tgaatgactc cttggctgaa ggaggagctt gggtgggatc agacaccatg |
| 16081 | tggcggcctc ccttcatctg gtggaagtgc cctggctcct cacggaggtg gggcctctgg |
| 16141 | aggggagccc cctattccgg cccaacccat ggcacccaca gaggcctcct tgcagggcag |
| 16201 | cctcttcctc tgggtoggag gcbgtggtgg gccctgccct gggccctctg gccaccagcg |
| 16261 | gcctggcctg gggacaccgc ctccgggctt agcctcccat cacaccctac tttagcccac |
| 16321 | cttggtggaa gggcctggac atgagccttg cacggggaga aggtggcccc tgattgccat |
| 16381 | ccccagcagg tgaagagtca aggcgtgctc cgatgggggc aacagcagtt gggtccctgt |
| 16441 | ggcctgagac tcacccttgt ctcccagaga cacagcattg ccccttatgg cagcctctcc |
| 16501 | ctgcactctc tgcccgtctg tgcccgcctc ttcctgojgc aggtgtccta gccagtgctg |
| 16561 | cctctttccg ccgctctctc tgtcttttgc tgtagcgctc ggatccttcc agggcctggg |
| 16621 | ggctgaccgg ctgggtgggg gtgcagctgc ggacatgtta gggggtgttg catggtgatt |
| 16681 | ttttttctct ctctctgctg atgctctagc ttagatgtct ttccttttgc ctttttgcag |
| 16741 | tccctgtggg ccttgctcag agcggagaaa gcatttgttt gtacaagatc cgcagacgtg |
| 16801 | taaatgttcc tgcaaaaaca cagactcgcg ttgcaaggcg aggcagcttg agttaaacga |
| 16861 | acgtacttgc aggttggttc ccagagggca agcaagtcag agaggggcat cacacagaga |
| 16921 | tggggagaga gagagagaaa gagagtgagc gagcgagcga gojggagagc gcctgagagg |
| 16981 | ggccagctgc ttgctcagtt tctagctgcc tgcctggtga ctgctgcctt ctctgctttt |
| 17041 | aaggcccctg tggtgggctg caggcactgg tccagcctgg cggggcctgt tccgaggttg |
| 17101 | ccctggttgc ctgagtggta ggcbggtgtg gcttagtgta gtggtgtgga cgcaagctgt |
| 17161 | gtgttgtgtc ctgtggtcct tctgctcata gtggctgttg gtcctgatgt tattactacc |
| 17221 | tctggtagta atgctgagaa gctgaaagcc gattccaggt gtggacaatg tcaacaaagc |
| 17281 | acagatgctc tcgctggggc cttgcctcgg ccctttgaag tctgcatggc tgggcttctc |
| 17341 | actcactcag tgtttcttgc tgggggaagg aattgagtct cccacttcag actgggcctc |
| 17401 | cctgaggaaa gggttgtgtc tccccactca gactgaggtt ccctgagggt agggctgtgt |
| 17461 | ctctcccctc cgacctgggc tccctgatag ggctgtctcc ccgctcagac tgaggctccc |
| 17521 | tcaggccagg gctatgtctc cctcctcaga ctggggctct gagggcaagg ggtctggctg |
| 17581 | ttcgtttagg atggggcact tttgcctaca cactgaagga gctgtagcat ccaagaatac |
| 17641 | tagatacctt taatcctcca ccagtcatgg tgacaacccc aagcagccca cacattttca |
| 17701 | agtgccccca ggatgcgtgg agggaggggt ctgtgcccat tctcctgaca ttagcctgtg |
| 17761 | agctccgtaa gccojggcct cgtttacgta cctttgtgag cccojggcat ctgtacctct |
| 17821 | ttcctttgcc catactgggg accaaggaag tgtcaagtgc atgagtgaat gtgtgactca |
| 17881 | gttcagaggg tgaggtcagg agcacagggt cgggacaggt ggctggcatc ttttaatgcc |
| 17941 | ttagcttatg ttctttatac caacttggcc tgtgctcaga gtgagggagg ccctgggggt |
| 18001 | cagggtaagc gtcagtcagg gaggcaagac tttgtgggga tttcctagac agggccaagg |
| 18061 | cacccccagc tcaccccgag gcbgtgttag ggaagtcctt ggagtgtctc ccctccccca |
| 18121 | gcaatgttct tgtggcttgt gtgtgctcag gggatgctgg gaaccaggcc tgggtagttg |
| 18181 | gtgtggggtg ctgtctgtct tggccctatg tgaaaccaag agggcgtata ttagtgctgg |
| 18241 | ggtgggggct ctgcctaact tcagggctgg atgaggggag tctcagttcc ccaggggtcc |
| 18301 | ttgggaaaga taagggactt gacattttag ggtttttagg tgattattct gctgatgggg |
| 18361 | gtttgtgtga agtgacctgg gagctaactg aagttactct aacctcccaa tacctttacc |
| 18421 | caacccccaa gctggctgta tctgggaata tcagtttcca aaattggagg cttaggactc |
| 18481 | cgtttogggg ctccccagaa gggtagggcc tgttctgcct ccttctcaca atcacccagg |
| 18541 | ggcaggggca tgctgagaaa gttcttggag gccccctttg cttcagctgg agtagtgaag |
| 18601 | ccgccgaatt gtotctoccc atcctaagtg aagcagcata tttgaaagga aagacaacct |
| 18661 | gttacctggg cctgcaacct ccaggcagct caagagagat gaggcctaca gccacagtgg |
| 18721 | gaggggacat ggggaatgga gatggtccct caccttcctg gggcctcctg ctctacgcta |
| 18781 | ccccctojgg agcctcctgt ccccagggca ggcccttgcc attgttggtc acccggccaa |
| 18841 | gcctctctgc ctcaggcgtt ctcccagaag atctgcccac tctcttcccc acaccagccc |
| 18901 | ctagagactg aactgaaaac cctcctcagc agggagcctc ttctgattaa cttcatccag |
| 18961 | ctctggtcac ccatcagctc ttaaaatgtc aagtggggac tgttctttgg tatccgttca |
| 19021 | tttgttgctt tgtaaagtgt tcccatgtcc ttgtcttgtc tcaagtagat tgcaagctca |
| 19081 | ggagggtaga ctgggagccc ctgagtggag ctgctgctca ggccggggct ccctgagggc |
| 19141 | agggctgggg ctgttctcat actggggctt tctgccccag gaccacacct tcctgtcctc |
| 19201 | tctgctctta tggtgccgga ggctgcagtg acccaggggc ccccaggaat ggggaggccg |
| 19261 | cctgcctcat cgccaggcct cctcacttgg ccctaacccc agcctttgtt ttccatttcc |
| 19321 | ctcagatgtg acaagccgag goggtgagcc gggcaggagg aaggagcctc cctcagggtt |
| 19381 | tojggaacca gatctctcac caggaaagac tgatacagaa cgatcgatac agaaaccacg |
| 19441 | ctgccgccac cacaccatca ccatcgacag aacagtcctt aatccagaaa cctgaaatga |
| 19501 | aggaagagga gactctgcgc agagcacttt gggtccggag ggcgagactc cggcggaagc |
| 19561 | attccojggc gggtgaccca gcacggtccc tcttggaatt ggattcgcca ttttattttt |
| 19621 | cttgctgcta aatcaccgag cccggaagat tagagagttt tatttctggg attcctgtag |
| 19681 | acacacccac ccacatacat acatttatat atatatatat tatatatata taaaaataaa |
| 19741 | tatctctatt ttatatatat aaaatatata tattcttttt ttaaattaac agtgctaatg |
| 19801 | ttattggtgt cttcactgga tgtatttgac tgcbgtggac ttgagttggg aggggaatgt |
| 19861 | tcccactcag atcctgacag ggaagaggag gagatgagag actctggcat gatctttttt |
| 19921 | ttgtcccact tggtggggcc agggtcctct cccctgccca ggaatgtgca aggccagggc |
| 19981 | atgggggcaa atatgaccca gttttgggaa caccgacaaa cccagccctg gcgctgagcc |
| 20041 | tctctacccc aggtcagacg gacagaaaga cagatcacag gtacagggat gaggacaccg |
| 20101 | gctctgacca ggagtttggg gagcttcagg acattgctgt gctttgggga ttccctccac |
| 20161 | atgctgcacg cgcatctcgc ccccaggggc actgcctgga agattcagga gcctgggcgg |
| 20221 | ccttcgctta ctctcacctg cttctgagtt gcccaggaga ccactggcag atgtcccggc |
| 20281 | gaagagaaga gacacattgt tggaagaagc agcccatgac agctcccctt cctgggactc |
| 20341 | gccctcatcc tcttcctgct ccccttcctg gggtgcagcc taaaaggacc tatgtcctca |
| 20401 | caccattgaa accactagtt ctgtcccccc aggagacctg gttgtgtgtg tgtgagtggt |
| 20461 | tgaccttcct ccatcccctg gtccttccct tcccttcccg aggcacagag agacagggca |
| 20521 | ggatccacgt gcccattgtg gaggcagaga aaagagaaag tgttttatat acggtactta |
| 20581 | tttaatatcc ctttttaatt agaaattaaa acagttaatt taattaaaga gtagggtttt |
| 20641 | ttttcagtat tcttggttaa tatttaattt caactattta tgagatgtat cttttgctct |
| 20701 | ctcttgctct cttatttgta coggtttttg tatataaaat tcatgtttcc aatctctctc |
| 20761 | tccctgatcg gtgacagtca ctagcttatc ttgaacagat atttaatttt gctaacactc |
| 20821 | agctctgccc tccccgatcc cctggctccc cagcacacat tcctttgaaa taaggtttca |
| 20881 | atatacatct acatactata tatatatttg gcaacttgta tttgbitgta tatatatata |
| 20941 | tatatgttta tgtatatatg tgattctgat aaaatagaca ttgctattct gttttttata |
| 21001 | tgtaaaaaca aaacaagaaa aaatagagaa ttctacatac taaatctctc tcctttttta |
| 21061 | attttaatat ttgttatcat ttatttattg gtgctactgt ttatccgtaa taattgtggg |
| 21121 | gaaaagatat taacatcacg tctttgtctc tagtgcagtt tttcgagata ttccgtagta |
| 21181 | catatttatt tttaaacaac gacaaagaaa tacagatata tcttaaaaaa aaaaaagcat |
| 21241 | tttgtattaa agaatttaat tctgatctca aagctcctct tggtttctcc ttctccattg |
| 21301 | aatccttgct ctagacttcc tcccgccccc tttccctctt cctctgggga acatggcatt |
| 21361 | tgtcttgggt ctgggaaagg tacgtctaat gtgtaggata tggggtgacc caccttgttg |
| 21421 | tgcbgggggc aaagtccttc cattttggct gagctggtcc tgggggaacc catccatcct |
| 21481 | gtcttgatat agaaggtggg aagctctggg aatgggtgga gggggagaaa cagcttagga |
| 21541 | gccaagggcc cttgcaattg gtagtgctgc cttcaggaat tagatgatcc aggcccctgt |
| 21601 | cccttagcca gggaaagaac tggccatgtc tccaagcttg ctgcccagga gacaggagag |
| 21661 | agcbgttttt gtctgtgggg gtcttgttgg ctgcaacagg ctgggagtgg gagggggatg |
| 21721 | ctgctggagg gctgtgactc cagggtgtaa cttaatttta catagtttta caccctggag |
| 21781 | ttccttgagc ctctggaaga tggacccata ggtttggtca ccactgatgg gacactccct |
| 21841 | gccccagctt gccataagct cttctctcac gtcctgctcc tgggtaaggt ggcacctatc |
| 21901 | caggtctttg acactgaagg gcagtgcttc caaattcact tcctctagcc tctcatttat |
| 21961 | tcttgcaaac catagatatg gcttgaataa atattgagcc agtcattgtg ctgctatgaa |
| 22021 | taagacacaa ttccacccct caaggatctg gtgaggatgg gtgggtgggg agacccaaaa |
| 22081 | ctataaatcc atgagcagaa aaatacataa aatgtgctgg gggcatctga tctagcttgg |
| 22141 | gagtgggagt tgtattgggg gtggtggctg gggggtggtg tcttatgaca ttatctctag |
| 22201 | gctgccactt aaagtatggt ttgaagacag ggagaacggg gojgcggagt gaaagggttg |
| 22261 | aggacatccc aggcagaagg gatagtgtga gcaaggcatg aaggtggcac ttgggcaggg |
| 22321 | gcagggagtg ggtgggcagg gtggaggctg gagacacggg caagggttag ctccaaggga |
| 22381 | gcctgcagca ccatgccaag agcctagggc ctgtcaggga tgagcagcag ccgaggggtt |
| 22441 | ttaaacactg agojgctcag tcagatagac ttttccatag gtgcctggca acagtatggg |
| 22501 | aggcagagag gccggtagag gctgttgtgg tcttccagga ggaattgtgc tggtggtggg |
| 22561 | gaagcacctt tggtgactgg cagtgccggc cattgcaagg tctcagcctc aggcagcttt |
| 22621 | tggtctagta agtgctcctt tcccaatcac tgaccacgtg ccgaccccta cattggttaa |
| 22681 | cactgaatct gcacagcagc cctgggaggt aggtgctttt tttttttttt tttttttttt |
| 22741 | gagatggagt cttgctctgt cacccaggct ggagtacaat ggtgcgatct cgggtcactg |
| 22801 | caacctccgc ctcccaggtt caagggattc tccctcctca gcctcccgag tagctgggat |
| 22861 | tacaggcacg caccatcatg cccgactaat tttbitgttt tcgtagagac ggggtttcac |
| 22921 | catgttggcc aggctggcct caaacccttg acctcaggtg atctgcccgc cttggcctcc |
| 22981 | caaagtgctg gcattacaga tgtgagccac cgcgccojgc aggtaggggc ttttttcatc |
| 23041 | ccatctggat ttttgctgga gcctttaaat tggccgcctg gcttctcctc tggccttcct |
| 23101 | ttagttgaat ctcacacaac tgccagagtg agcctgttaa aatgtgagtt aagttttggc |
| 23161 | accttttgac tcaaaacctt ccagagatag ttttactcgg agaaaaaccc aaatggcctt |
| 23221 | aaaaggcctg caccatttgg gctgcctccc tgactactca atgacttcgg gc |
| Human VEGF-B Gene (NCBI Accession No. NG_029823.1) | |
| (SEQ ID NO: 81) | |
| 1 | gccgtcccog ccgccgctgc ccgccgccac cggccgcccg cccgccoggc tcctccggcc |
| 61 | gcctccgctg cgctgcgctg cgctgcctgc acccagggct cgggaggggg ccgcggagga |
| 121 | gtcgcccccc gcgccojgcc cccgcccgcc gcgccojggc ccgcgccatg gggctctggc |
| 181 | tgtcgccgcc ccccgcgccg cojggctagg gcgatgojgg cgccccojgc gggcggcccc |
| 241 | ggcgggcacc atgagccctc tgctccgccg cctgctgctc gccgcactcc tgcagctggc |
| 301 | ccccgcccag gtacgtgcgg cccgacagcg cgcccgcccg cccgccgtgc cctctctcaa |
| 361 | ggttggcgga agtgaggagg cgacccgcgg cctojgccga ggggatctgc ggggtccggc |
| 421 | cttggacgcg ggcgtctojg gggccoggcg cgtgcatccc ctgggaggtg cccctccccg |
| 481 | ctggcccgcc agccccagtc tggggccact cctccgcccc accccgtccc ctgggcaccg |
| 541 | cogggggcgg ggctccctcg gtgcctgcag gacctgcttc ggtgggcact gtgcgcgctc |
| 601 | ctgatctgca tgcagccccc aaacatgctc ggctccgcgg cctggagatt tggcgcggcc |
| 661 | accagagcac ctgttgcgtt ttgggccagg gcaggtcccg ggtggccagg agaggacagg |
| 721 | taaagctaga gcagtggccg caggaacaga gcaatctgga aagatgtcag agaggtggtg |
| 781 | aagcctactg atgcaagggc aaagccccag ggacggtgac agggccacac cctcctaaag |
| 841 | tgtaccttgg gtacaggtct tttctctccc acaggcccct gtctcccagc ctgatgcccc |
| 901 | tggccaccag aggaaaggta atacttacaa aaactojgca ctagccagca ctaagagggt |
| 961 | ttgtcatggg ccctgattcc aggtgtccat catcttgtgt aactccccta gaagattcaa |
| 1021 | actattattc tacccatttc acagaggagg aaattgaggc agtgggttta ctgggatctg |
| 1081 | gataaacagg gcaggggaag acaggttgtg agggcagagt ggggagggct agtggagggt |
| 1141 | ggctgtgact tggggactgg ggaggacaga tgctgggagc agctgcagga aaaccagtga |
| 1201 | ggacttaacc cctaccggtc tgctcccagt ggtgtcatgg atagatgtgt atactcgcgc |
| 1261 | tacctgccag cccojggagg tggtggtgcc cttgactgtg gagctcatgg gcaccgtggc |
| 1321 | caaacagctg gtgcccagct gcgtgactgt gcagcgctgt ggtggctgct gccctgacga |
| 1381 | tggcctggag tgbitgccca ctgggcagca ccaagtccgg atgcaggtac tgggcaggtg |
| 1441 | gggcaacggg caggggatgc aggtactggg caggtggggc agojggcagg gtggatgctg |
| 1501 | gctggctctg gggcbggggc agcctggaga ctgatgcaca ggagacaggg ttggggggag |
| 1561 | ggcbggtggc cagcctcccg gctgttgggt gagcttttct cccttcagtc ttagagcatc |
| 1621 | ccctttctct ctctccctca ctgtcccccc tgttcttctc ctgagcacag atcctcatga |
| 1681 | tccggtaccc gagcagtcag ctgggggaga tgtccctgga agaacacagc cagtgtgaat |
| 1741 | gcaggtgcca gccaggccca acttctgagc tcgcagaggc caggcttggg gggtgctggg |
| 1801 | tatggtggtc cacagaactg gggaccaggt tcctaagagt agaaccaagg ggccgggcgt |
| 1861 | ggtagctcac gcctgtaatc ccagcacttt gggaggccga ggcgggcgga tcatgaggtc |
| 1921 | aggagatcga gaccatcctg gctaacatgg taaaaacctg tctctactaa aaaaatacaa |
| 1981 | aaaattagcc gggcgtggtg gojggcacct gtagtcccag ctactccgga ggctgaggca |
| 2041 | ggagaatggc atgaacctgg gaggcgtagc ttgcagtgag ccaagatcgt gccactgcat |
| 2101 | tccagcctgg gcgacagagc aagactctgc cacaaaaaaa aaaaaaaaaa aaaaaaaaaa |
| 2161 | agagtagagc caagggtagg ccttggatct ggggcaacaa agtaggatgc ttgggccggg |
| 2221 | ggtagtggct cacacctata atcccagcac tttgggaggc ccaggcaggc agatcacctg |
| 2281 | aggtaaggcg tttgagacca gcctggccaa catggtgaaa ccccatctct actaaaaaaa |
| 2341 | aatacaaaaa ttagccgcgc atggtggcag gtgcctgtaa tcccagctac ttgggaggct |
| 2401 | gagacaagag aatagcttga acctgggagg cggaggttgc agtgagccga gaccacgcca |
| 2461 | ctgcactcca gcctgggcaa gaagagggaa acacagtctc aaagagagag agagagagag |
| 2521 | agagagagag agagagagag taggatgctg ggatttcctg atcttcctct tgtttgtctg |
| 2581 | tgtctgtcta tcttactttt cagacctaaa aaaaaggaca gtgcbgtgaa gccagacagg |
| 2641 | tgagtctttt ggactccagc tgagtagggg tatggggagt acaagtgagt ccagaagctg |
| 2701 | ttgctcctct ttctcctccc acccgtcccc cactttccct tttcctctgc tccccaagcc |
| 2761 | bitgttctct gccccgaccc cagctctagg gaagactctt ccttcccacc ccagacatgt |
| 2821 | cgcttctcct ccctagggct gccactcccc accaccgtcc ccagccccgt tctgttccgg |
| 2881 | gcbjggactc tgccccogga gcaccctccc cagctgacat cacccatccc actccagccc |
| 2941 | caggcccctc tgcccacgct gcacccagca ccaccagcgc cctgaccccc ggacctgccg |
| 3001 | ctgccgctgc cgacgccgca gcttcctccg ttgccaaggg cggggcttag agctcaaccc |
| 3061 | agacacctgc aggtgaggcg tctgtggggt ggtgtttgtt tgggaaggca ccaaggccct |
| 3121 | gtcctggagc aggtccaggg tgagcctgcc agtaggagga gggccaggga aggggaaact |
| 3181 | gttgaatgtg ttgaacaaat atttaccaaa cagctgctgg cacctggagc tgtataagca |
| 3241 | agtccaacat tctaactcag gagtcagata caggagggac aatgccagca gaggatgtca |
| 3301 | agggcbgtgg tgaggggtac ctggcctcgt ctttcagagg tcagagatct cttggaggag |
| 3361 | gtgacatctg ccoggagtag aaatgtagga cacagctttt ccagcttgca gttcgggcct |
| 3421 | tcccagaagc ccctgtggta gacatctgcc cttacctacg ggcttcaaga ggccagggga |
| 3481 | catagtggaa cccttgtcca cccttacctg abitgtttct caccatccgt gtcccgcagt |
| 3541 | gaggccatgg ggtgaaatca tatgggcagg gccagtgggg gctcccgagg agtgtcagga |
| 3601 | ggggatgacc tttgcaaaag gttcatcctt cgccctgcag cctccagtgc ccagggccga |
| 3661 | gtggtgtggc aggatgctca ggttgtgatc ttagtgggcc cgaggcacac atgagtccag |
| 3721 | ggcbjgggct gcgctccagc cagcatgaac agatcacttc ctccctcctc aggtgccgga |
| 3781 | agctgcgaag gtgacacatg gcttttcaga ctcagcaggg tgacttgcct cagaggctat |
| 3841 | atcccagtgg gggaacaaag aggagcctgg taaaaaacag ccaagccccc aagacctcag |
| 3901 | cccaggcaga agctgctcta ggacctgggc ctctcagagg gctcttctgc catcccttgt |
| 3961 | ctccctgagg ccatcatcaa acaggacaga gttggaagag gagactggga ggcagcaaga |
| 4021 | ggggtcacat accagctcag gggagaatgg agtactgtct cagtttctaa ccactctgtg |
| 4081 | caagtaagca tcttacaact ggctcttcct cccctcacta agaagaccca aacctctgca |
| 4141 | taatgggatt tgggctttgg tacaagaact gtgaccccca accctgataa aagagatgga |
| 4201 | aggagcbgtc cctgcctgtg tcactgtttg tcactgtcca ggctggctgg tttgggcatg |
| 4261 | aatgtctgca tcactaaatc cagagcttgt cttgctccct cattgtgcag atggaggaaa |
| 4321 | tgaggactaa ggccocacag cagatoccag gcagggccag aattatgtat tcatcacttt |
| 4381 | caagttattg ccacgcatgg gagtcaggga tagcccagtc aatacagact gcctgccctc |
| 4441 | ctgctcttca ccagggttct tttctagaag gagacagcct tctgtggcca gagagcttgg |
| 4501 | ggtaggaccc agatctactg agtgaccttg cttgtcacta cccctgcctc tctgagcagc |
| 4561 | agtttccaca tgtgcacata gagggaacag aagattgctg tggttggcgt cctcgggccc |
| 4621 | cagagaagtt tgagactatc tttacgtaat agaaaagaac acttgttctt cctgccaggc |
| 4681 | a |
| Human VEGF-C Gene (NCBI Accession No. NG_034216.1) | |
| (SEQ ID NO: 82) | |
| 1 | acttcgggga aggggaggga ggagggggac gagggctctg gcgggtttgg aggggctgaa |
| 61 | catcgcgggg tgttctggtg tcccccgccc cgcctctcca aaaagctaca ccgacgcgga |
| 121 | ccgcggcggc gtcctccctc gccctcgctt cacctcgcgg gctccgaatg cggggagctc |
| 181 | ggatgtccgg tttcctgtga ggcttttacc tgacacccgc cgcctttccc cggcactggc |
| 241 | tgggagggcg ccctgcaaag ttgggaacgc ggagcccogg acccgctccc gccgcctccg |
| 301 | gctcgcccag ggggggtcgc cgggaggagc cojggggaga gggaccagga ggggcccgcg |
| 361 | gcctcgcagg ggcgcccgcg cccccacccc tgcccccgcc agcggaccgg tcccccaccc |
| 421 | coggtccttc caccatgcac ttgctgggct tcttctctgt ggcgtgttct ctgctcgccg |
| 481 | ctgcgctgct ccojggtcct cgcgaggcgc ccgccgccgc cgccgccttc gagtccggac |
| 541 | tojacctctc ggacgcggag cccgacgcgg gcgaggccac ggtaggtctg cgttagggtt |
| 601 | tgcggagaac ccgagagttt gctttagggt ctgcggcgga cccgagaacc tgcgcggggg |
| 661 | aaagtgtgtg tgctttaagc ttgtgtacgt gggatccaaa gttactgagc tcagtgcacg |
| 721 | ctgctttgga gaaaaatctt cttcttttta aatagaaagt tgttactaga gaggcaagca |
| 781 | agttacacga gtgaagggcc cggagaggtg cccagtgaga gatcccgaaa tctatttcag |
| 841 | actggtttcc tctggggcaa ccaaggggtc ttgaaccctg cccagtcagc ggggctctgg |
| 901 | agagtatgag ttcattttgg tcgggaaatg ctcgtttctt tccccagctg attcatggga |
| 961 | ctccaaacag attctgggac actggtgatc agtcaaccca gccttacttt cctggagtgt |
| 1021 | tcatagtctg cagagcacca ggcgcbgtga gcgactttag aaaaaaagtg tcagggactt |
| 1081 | tagtaaccag gctccagagc tttcagagtt cacttgaagt tggtcagact tgagatgtaa |
| 1141 | cgggagatta gagtcagtta gatcacaatc aagcaatgca aggcttgttt caactttata |
| 1201 | agctcttcat tcctaaaatc tggtcatgag atactgcaaa ctaagttttt ttttttcttg |
| 1261 | tttgggtttt ttgtttgttt tgttttcttt taaataagag gtgtttaatc ctttgcctga |
| 1321 | aaatgttgcc aaaatacttt tgaggcatcc tgattttgaa aaaggatttg tgtgtgttcc |
| 1381 | tacttcttac tggctcttcc aaaagagtat atctttatct aaaaagttca tacctgccat |
| 1441 | aaccatatag agtatgctta agagagttcc taaagaagtt atattcgaca tttcagttca |
| 1501 | aacacttgca gtaccccttg ctggaactat actgoggtag tttatttcaa ctggtggcaa |
| 1561 | gtggagaggt acctgtggtg tgttacagtc aactttaatt tgactgttga ttaacacata |
| 1621 | cacaatgtgt agaaaatagc cttatatttt gaaatatttt atttatattt atattttgaa |
| 1681 | atacacttaa agattgagaa gactaatttt tggaaatcaa actacctttg catttaaatt |
| 1741 | ttgggaaaac attaaaatgt tggaatgtgt aataatttaa tataggggtt aaaggaatgc |
| 1801 | ctcttgagta aaaacaatat acatgaaata gaacagactg cattctgtga atcacaaaaa |
| 1861 | taattttcag tgcctatact tacattgccg taactatagt gatgaaaata tctttctgtt |
| 1921 | cttaaatacc gcagaaatgt aataatcggc tcaataacgc ttctgataat ttgagtcctt |
| 1981 | gattttgcag tacctatttg ctatttctgc aaagtcaaaa ctagtaaaag tatgatttag |
| 2041 | taaggcaaca tctctgtatt ggttacggtc acttactttg gtttacagta agaaaatgtg |
| 2101 | cagtagagag taaaatgaga aacattccct gataagccaa tagcctgtat gagagtcact |
| 2161 | cactgcbjgg tgagtctaga attaatgtac cttgagtgtg tgtgtgtgtg tgtttacgtg |
| 2221 | bittatgtat aggtatggga ttggaggatt aaaaaagtta acttattttt aactttcaaa |
| 2281 | agtgtcttcg ttggtgatgt aaaatttgcc attggtgata tggcaaattt taccattgct |
| 2341 | gtgaaaatca ctatgcattt tbitttgcaa atgtcgcttt tcatatttaa ccatttttat |
| 2401 | attctgtatg gtgaatatgg gttagtattc tgcatgtgat gtgggttcct ttcctatgtg |
| 2461 | atgaaacatc atttcccata tgaaacatca tctctgagtt ccatagacca caaagcagta |
| 2521 | tttcattgct ccattaaagt gtcgttcccc agtgggtgaa tagagccttg acagggcatg |
| 2581 | tgtcattaat gcattcagtg aaactgctgt gtccttgcta tgaaacatgt cacacaactg |
| 2641 | ccaagaaact gatatgaaga ctctatgtct ctccctagtg gcctgtacaa gcaccacatt |
| 2701 | tagatttaag cactagagaa gaactgggga gaaatcaatt gttaattttc tataactaca |
| 2761 | tgaaccccaa gaaaatattt cagaaggtaa acagaagatg ctaaatatct ataatcccaa |
| 2821 | tagatgcaat gttttcataa ctttcaccta ggaacttttt taatatttaa aaaatcaaaa |
| 2881 | atagcacaca aactatgaac caaggttagc catccagccc ttcagcccac ccgtaaagcc |
| 2941 | atgcaaaaga ttgtaggtaa aaatcacaaa tagaatgaag atctccttat tcctcgactt |
| 3001 | atatttgcat ttactggatt cctatttcta gttatttgtg gttgcatgac ttactgaaaa |
| 3061 | gtcttaaaat gtttctctga aggatgttaa cacaaacaag acagtgtcaa aaaagtaagg |
| 3121 | caggcaaaag taaaattaac tggacatgat gggaacaaaa gagaatagca agtctgaagc |
| 3181 | tgttctattt acaatttttc ttatagtata tgattatgtt tgtcaacatc tactcttata |
| 3241 | agagatttct gacattcctc tgagtgatgc tacttatatg aggttttaga tatagaaagt |
| 3301 | tcaattcatc tttcattttg atttccactc cattatagtc ttctgaacta tgaatatctg |
| 3361 | attgatagct atttattcac aagacagtta tcaaaattgc ttcatagaaa gcagttaatt |
| 3421 | actgatctta gtggcatatg tctaagaccc gtagatctct aatcctgtcc ttttcagttg |
| 3481 | agttgagaaa gacggagggt agtggattta gatttcattt tggacttcca gttctggttc |
| 3541 | cggttcctct tgagaggaag gtcctggcct cctagttatc tccatgtgtc caacccagaa |
| 3601 | tgcbgtttct cagctcttgc tggggttttc accaacagag gaactggcgt gagactaatg |
| 3661 | aaggtttccc gaatccctgg gactgtgctt gcctgcttgc ctttggcagt cctggggttg |
| 3721 | ttattgagag taggagttta taatcattat ctgtgatgtt cataacgtgt gttaagcact |
| 3781 | tcgcaaagag ctttgcaagt tagttttgtt tttcactaca cctccataat atggacatta |
| 3841 | ttttatttca ttaaggatga tgaacccaag atctgaatga cttaaccagg aaaaagaata |
| 3901 | gatgtttttt tccttttttt cttttaaaaa aagttttatg gcatatacca acagtccccg |
| 3961 | acttagaatg gttctattta ggacttttgg actttacaat ggtgcaaagt cgatagacat |
| 4021 | tcagtagaaa ccatacttca aggtttgaat tttgatottt toctgggcta ataatatgca |
| 4081 | gtaaaatact ttctctggat gctggacaat ggaagtgagc tgtgaccagt cagccatgtg |
| 4141 | atcgtgagag taaacaacag gtactctact gtatattaaa tatattttca actcaggagg |
| 4201 | aatttgtcag gatgtagccc catcgtaaat cgagaagcat gtatgtttta gagaaatgtg |
| 4261 | gtaatgggtt tgggcctttg ggcctgtgat tcagactcct ttcagcccct ctgctggtct |
| 4321 | cctttggcac actatagcag cgtgcaggaa ggcagagaaa agcactgcgt gtgactttgc |
| 4381 | agttaggggc accttgttgc atttatttag gtcctaattc cccacaacgg gacaaacgga |
| 4441 | aataaaccca gactttcttc caggctttac cacatggtgt tcgtttgact aaagataaat |
| 4501 | tataaatgac ctaatccatg gtaatattat aagaacgact gcttaactgg aggcttaaca |
| 4561 | agattttctg acaaacggtt tttcaaagtt gtgctcaagt aacttcagtg aaagattgtg |
| 4621 | attttacctc tgccaaatga cctttcacaa ataagtggat ttggaaagaa caaatttaag |
| 4681 | ttggcagaag cgttatactt cctctgactt ctgagcatat attgtttcac ctttcaccag |
| 4741 | ttacattatt ccttgtagat gtgcatttta taaatactat atgggtctac cttttgttac |
| 4801 | aaacacatat ttgtatgtac agatttgtat aaattgtgga ttaagttatc attgattttt |
| 4861 | ctcattagaa aaaacagata tagcagagaa ctttaaacaa ggagagatgc tgatgagttt |
| 4921 | gagttatagt gtaattataa aatttactat aaatatttta ggtttgtgta attgtttttc |
| 4981 | tgaaacttac tagtgtaaat ttttggggtg gcttctttcc toggttgatt aatttttttt |
| 5041 | ttcagagttt atgtttaacc atgagaaagc agagactgtt tttatttaat ttgctttatt |
| 5101 | gggcatccat catggaatta atcaaattgt acattaaatg ctttgtcagt ggattagtac |
| 5161 | tgtttcctta tactgctcgc gccctagtgg ctttcaggtg ttaggagtta tccacgatag |
| 5221 | ttttttttcc aattttgaaa tccaaaaact cattttcttt ttctttcttt cctttttttt |
| 5281 | tttttttttg agacagggtc atgctctatt gcccaggctg gagtgcagtg gcatgatgtt |
| 5341 | ggctcactgc aacctctgcc tcgtgggttc aagcgattct cgtgcctcag cctcccaagt |
| 5401 | agctggaatt acaggcatgt gccactagag caggctaatt tttgtatttt tcatagagag |
| 5461 | agggttttgt cttgtaggcg aagcbggttt caaactcctg acttcaggtg atccacttga |
| 5521 | tctcctaaag tgctgggatt acaggcatga gccactgcgc ccggccccaa aagctaattt |
| 5581 | tcttaaatta tttggtgcta taatcctgat ctgaactgac ataaggctat ttatagtcat |
| 5641 | tattatctaa tttaaatatt tctaatcttc actgggaaaa tagtaatgta tttatttaca |
| 5701 | tgatgctgcc atcagtcctg cttgtttttg gggtgtgagt attaatatgt ctatgcactt |
| 5761 | ggtttccaga aaaattccag gttcagagac tcttgcagtc tccaggcatt ttggataagc |
| 5821 | agatggattg tagccctgtt ccacaggcct tcctccattg ctttattgcc ttggggctgc |
| 5881 | ctggaagagg cagggaaagg taatccagga attcaagaaa gaagccatgt ggatgctcct |
| 5941 | aattcctttt tacccattag taccaggttt atttgctctt taatctactt caactcatgt |
| 6001 | taatcagttc ttactagtgg cagcttcagt tctaagcagg aaattacagt tcagtgtgtg |
| 6061 | atgcaaaaaa tgtagagtga gtgatcttgt ctataacaag cttataatca ttttggagaa |
| 6121 | aataaattta ctcattaaaa atactacaag tgaattaaac tataaatcca gaccatgtaa |
| 6181 | gtggttttgt aagagagtct tgtgagttac caccagttgt tggctagcct tctgggagtt |
| 6241 | gcatgggcag gcctgggaaa ggtggaatga tatgagaccc aatgttaaaa atgagtagat |
| 6301 | gctaattaca gaaatggggg agagagggat gttttgaata ttgaagaatg acagcaaagt |
| 6361 | acagaggaag taaaggtcag ggatatttgg ggaactagaa gcaaaccctt tggtgcaaaa |
| 6421 | gtcaagagct ttaagggaaa ctgaagggag catggtggga agtgtgaaaa ccaaagagaa |
| 6481 | agtctgagtt tgagttgaaa gcagcaggag ccaatgaaga ttctttagtg gtatgctgaa |
| 6541 | agtgaggttt ttaaggagct taacctggca ttgttgcaca gaagtgtcta agaaagctga |
| 6601 | ccagaagctt ctcagaagct tctcagaagc cattttcaac tgcagggttt cttaaagtgt |
| 6661 | ctggcagtga ctctgccttt ctcattacag tggccaccca tatatggtat tcgaactcct |
| 6721 | ctatatgctc ctgattgctg gcgatgatag tggtgattac ttttgactta ctgtaggcac |
| 6781 | ccatcattgt gctatctgga tacatttaca aaagtataga aatagacatc tctgccatta |
| 6841 | tggtttgcat tccaaacgaa gcaagcagtg taaacagtgg tcatgcttag atacacatac |
| 6901 | acagaacccc ccacacacat attcatgcat acaccgctta atagttcttc agactgccaa |
| 6961 | gtgtgactta cgtgttcttt cttgcatggt taagaatttg tagacagttc attgaaatag |
| 7021 | aatatttaga caatcagaag tgtacaagat tagaatctct atatttgcac acacatttat |
| 7081 | ttgtaggtca gtgggcaatt gaaaaaaaag agaaggagag aaccctaaag tgtcctggaa |
| 7141 | attcctgctt tttaaaatct gctaaaaatg agaccagaaa ggtgggagtg gggatgtgag |
| 7201 | gaggtgggta aactaccaaa taaacaatat aaatactttg gcbgttctta taaaaggttt |
| 7261 | ttttaaatat ggtggaataa tttactcaaa ctcaagagat gccacctact agagaaagga |
| 7321 | catactgaaa gaggaaatat tcaaatgcac aactttgtgt aaaaggtaat acttacaagt |
| 7381 | ttaaaagact cacttctaaa gaagtttggc ttcaacctgt cctcatttgg acaggtggaa |
| 7441 | agatgtatat tttggggtag accagaaaga tgtggtttga cttctatagt tgaaaggttt |
| 7501 | ctatttagac atttattttg taatttaatt tacctaaaac ttcatcccta aattaccatt |
| 7561 | ttctcttact tttatgcaat agtaaagtat gcagtcataa gtgataaagg ctgggatcaa |
| 7621 | agctagctat tttgctaact gcagaaccta tgcactctgt ttacactgcc tgtgatagcg |
| 7681 | cctggaagaa ctcactgcca atatttctgc ttgtttcagt cacataactg ttgcttgtgt |
| 7741 | cagtgacgta acttgtttag agatgcagtg cagtggataa gagcacaggg tatggacatg |
| 7801 | cctttctgta ttcatgtcct gaggatgcct cttagtacct gtgtgacctt ggacaagtta |
| 7861 | cttagtttct ctctgcttct ttgtagcaca atgagtagat gctaattttt aatttttaat |
| 7921 | tttttctttt tcttbitgtc tgttttgtgt atttagttac tttatctttt tttttttttt |
| 7981 | tttttttttg agacagactc tggctctgta gcccaggctg gatggaatgc agtggtgcta |
| 8041 | tctcagctca ctgcaagctc cgcctcccag gttcacgcca ttctcctgcc tcagcctcct |
| 8101 | gagtagctgg aactacaggt gcccaccacc acacccagct aatttttttt ttatattttt |
| 8161 | ttagtagaga cggggtttga ccatgttagc cagaatggtc tcaatctcct gacctcgtga |
| 8221 | tctgcccgcc tojgcctccc aaagtgctgg gattacaggt gtgaaccacc acgcccagcc |
| 8281 | tagttacttt atccttttaa aagtcctctt ccaaaatgta gaatataatt aatgcctgct |
| 8341 | taatcaggtt gttttgagga taagaatgtg tatataggcc aggtgtggtg gctcacgtct |
| 8401 | gtaatcccag cactttggga gtctgagtca ggtagatcac ttgaacccag gagtttgaga |
| 8461 | ccagcctgag caacatgggg aaaaccctat ctctacaaaa aatagaaaaa ttaactgggc |
| 8521 | atggtgacac gtgcctgtat tcacagctac tctggaggct gaggtgagaa gatggcttga |
| 8581 | goccaggagg cggaggttgc agtgagtgag ctgagatcac cccactgcac tccagcctgg |
| 8641 | gcaacagagt gagactctgt ttcaaaaaaa aaaaaaaaaa aacagcatgt gcatacatat |
| 8701 | aaagcccttg gaaccatgat tggcatatag taagctttct gtaaatttgt gttaaataga |
| 8761 | tagtcttcat gatcagaaaa caaacaaaga atatagcatg taagtactat gtcctagaca |
| 8821 | tatgacataa ctgtgattct tcagcacctt gcaactaatt tattaaattt ttaaaattat |
| 8881 | aaattactga caattttccc aatttctaaa atatagcaag aggatataat actgatgttt |
| 8941 | gattttgaaa caggtgaagg aaatgcaggg tgtttaatca ttcagtgtct ggaggctaca |
| 9001 | tactgtagtt ctgcctataa tatgttccca cttcccctgg gtgccggggt ttgttcctct |
| 9061 | cctggagggc agcacaggtg tccatagacc acaccaaacc aaagaatctg ggatgatgct |
| 9121 | gtctccttat gtgcttcatt catacttagg tcatttggct gtaaaggatt ttggtacaca |
| 9181 | taagcttttt ataatgccat ataatttaat atgaactcat cttgaatata ttcagagcat |
| 9241 | atacattttc aagtttaaat gtttattaat gaaacatgct aatgttgcta ctttgatgtg |
| 9301 | taaatatctc atctatatta ttgccacaaa aaataaatat gcattctaaa tttacaatga |
| 9361 | aatcatcaca gaatacctaa aatatcaaca atttcactga ggaaaatata aagaaaactt |
| 9421 | aaggggagaa tgctatatgc cagagttaaa cttgtgtgaa tttgtttagg aaaatgtgat |
| 9481 | tgcactgttc ctaagggacc ctcttccaga atggtaacta gtacagcgtg tgctgtctga |
| 9541 | gatgtgcgga cactgggaca ctgggatgaa ttatggagta gatactttcc ttctctgaga |
| 9601 | gtaagctgat ttgcttgagt actctagttt attccaaata gttgattttg tttggtggtt |
| 9661 | ctctttgtca atttgccagt cagtgctgtg acttgcgtgg ttaccctgtg ctgaagacta |
| 9721 | cagtgcbjgg ggcattggag gcccgtgagc agacaggaaa aagggaggaa aaatcagtgg |
| 9781 | tggacacact tcccagctct tgaacagctg acagcatatt tttttgattc agtaacatcc |
| 9841 | agaaagtatt cacttcccta ggattccagt gcagatgtta gttggagtat tttagaactt |
| 9901 | ttgaccagat accacatttt taaacagaat tttttttctg actggaactg gaacaaagca |
| 9961 | ctaaacacta aatagaccct caggtagtat gtaagtacat taaaaattag ataatactat |
| 10021 | attattcatt cacatctcta tggagatact gtatcatctt tttaaaagca attttcgtat |
| 10081 | taatatttgt atttcagaat tagaattgta tgtaagcata taataaaatg aagctttata |
| 10141 | gttcagtgct attatgtttt cccaattata gaattcaaat taacatttta atgtgatttt |
| 10201 | cttcatagta atttttcatt gtcacactaa tttatttttc tctcaacttt tttttattta |
| 10261 | aaaatttttt ttttttttaa tttgagacag gcctcactct atttcccagg ctgcagtgca |
| 10321 | gtggcatgaa cgtggctcgt tgcagcctcc gcctcctgta ctcaagtgat ccacctacct |
| 10381 | cagcttccca agtagcbjgg atcacaggca cgtgccaccc cacccagcta ttttttaaaa |
| 10441 | ttttttgtag aaatgaggtc tcactaagtt gcccaggctg ctctcaaact cctgggctca |
| 10501 | agtgatctgc cttggcctcc caaagtgctg ggattacagg catgagccgc tgttccagcc |
| 10561 | taatttcttt ttctcttaca agtgctttgc ttacattttt attgttagaa acaggattca |
| 10621 | aataactgct tatttaatat tctttttatg tagaagaaac agtcttgaac ttgataatac |
| 10681 | ttttggttcc aacttgttaa aatattggaa aaggatgaaa catttgtgaa aataatcaga |
| 10741 | ccttggcact goggtagttg aggaagagtc atgcgtgtga gtgagtgcca ctctgagaca |
| 10801 | ggcagcactt tctcccttgt ggtaattgaa tagggtatgg gaagccgact acttaatctg |
| 10861 | cttcaggcaa gcagtgttca aagtttaacg ccottttact gaaatgacaa acataatcac |
| 10921 | cttacctaaa aggatgtgtg ggtaatgatt ttaccaaata gttcacttgg tgaacaatag |
| 10981 | tgaaaacagt tcaccttccc ttgtctttgt ttacaattaa atgagcccct ccaggtccct |
| 11041 | ccctgcccca agagtggatg aatttggcaa atcagactga aatgttaaag aaaatggtct |
| 11101 | tgactactct gttttaactg aagtgaccac acagctgcca tgaatcctgt gattgaattc |
| 11161 | ctataacctg taaaagggat tgttatttcc actcactcca aatttcttgg aagtagctag |
| 11221 | ttgatatcag ataccagatg cgaggctatt ttaaatcact gtgatttaat ttactataat |
| 11281 | atcattgcct acatggaata tttttaattc tttctttttg tttgtgtctg ttttgtgtat |
| 11341 | ttagttactt tatcctttta aaagtcctct tccaagttta tgttttgaaa aaagagaaca |
| 11401 | cttactgaga ttcatgtttg cttacaggtc atgacattta tgacttccct aaaaaacaaa |
| 11461 | ctgatccctt tgtctcagag ccaaatttta gttttaacat aatagtgatt cattgtttgt |
| 11521 | tctctctgag tcctagatct ctcttttaat tttggtgtct gtccatgcca aattagaatt |
| 11581 | ttattaaggc caaaattatt catgagtcat gaccatcaca cttaacaatt gggtaatttg |
| 11641 | aagctgcttc agatacacat taaagcaaat aatgatgtca taaattttaa tgcaatattt |
| 11701 | tttttccttt aatattggta gcagtgaagc ctgctctgtt agagaccaat tctgttttac |
| 11761 | tttagaaaaa tgtacctttg tgctcatgtc catgagagca cagtgtagtt attttattac |
| 11821 | tataatatag cacacagtga cacataactt agtaaattaa agattgaaaa tatttaaaat |
| 11881 | tggtgatttt ttgtgccatg ttgatttgac atttattctt ctatctgtct aaaactagga |
| 11941 | gcagtgctag tgtgacagcc tcaagtcatg ttaacacgac acacgtagaa gactgacgct |
| 12001 | cgggcttcct ctagtgcaaa acacctgaaa ttcaaatttt gcttttctgt gctattttcc |
| 12061 | taattaaatg tatccttgat gttgagttta actttattac acccctgtta aatatctgca |
| 12121 | atgtgttggg aaggaggagg acacatatgc ctgatttaaa tttaatataa ctgtatagat |
| 12181 | ataatttcat tttccattca atcattgaaa tgatataaat taatatatgt acagctaaaa |
| 12241 | ttaaatctgt gatgtcgaga tgaactccat gctgtccttg gtgcactgtg tattacacat |
| 12301 | gggtattaaa tgcgtgctta gtgcttagtg aatgggttag aaggagtttt tttttttttt |
| 12361 | ttttgagatg gagtctcgct ctgtcgccca ggctggagtg cagtggggta atctcggctc |
| 12421 | actgcaacct ccgcctcccg ggttcaagca attctccctg cttcagcctt ctgagtagct |
| 12481 | gggattacag gcacgcacca ccatgccagg ctaatttttg tattatttag tagagactgg |
| 12541 | gtttcaccct gttggccagg ctggtcttga acacctgacc tcaggtgacc tgcccgcctc |
| 12601 | tgcctcccaa agtgttggga ttacaggcgt gagccaccac acctggccta gaaaagagtt |
| 12661 | ttaatagata cccctgtaaa atgccaagca atcagttgcc attactaaga actgcaacaa |
| 12721 | gttccagtta aagatgtaca tgtttaagag ctgtcgttct ttaataaaat atgaccaaga |
| 12781 | tgtcttaaac atgggcttta atacatgtta ctgtgggttt cactccaact taatagcaca |
| 12841 | caaagttctg aagacacatg atttcactgg tggtacattc gcacattgtt ttctgtccat |
| 12901 | gtttaagttc attcttgtcc agaacagttt ctggttttct aagcctaacg tattaacatt |
| 12961 | tgagttaatt aaatcgatag ggagcctttt atcttttttt ttttcctatc tgggggcttt |
| 13021 | gctttcgcac tgacattagc agttcccttc ctatgtgcaa taggaaaatg tgcagtcatt |
| 13081 | ccaggagcat ggtctcctca ggaggttaaa agtgattgta acttagaggt taatgtttca |
| 13141 | ctccagagga aagtgtttca coccacttga tgatgtgocc ctgggtgctc acagaaagag |
| 13201 | tagtactctt ttttaaacca aaattttaga cacgtgttat gcaaatcttc tttataaatt |
| 13261 | acacattctt ttctttcctt ttattctttt actccagtat actattttgc aattaaaaca |
| 13321 | ttttaaactt cttccagaaa aaaacttctt ccaataactt cttacttcaa actactttta |
| 13381 | ctaatgacaa aataactatg tccatcacag tgaggaatta ttcattgttt ataccacctt |
| 13441 | gtattactta tataaatatc atcctataaa aaatactata tattgggact agattttctt |
| 13501 | aaatttaaat ttaaattctt ttggaaaatc aggttctatc agctctgttg tcttttcatc |
| 13561 | tctaattgta catcttccca ctattttgat ttatacatga tgttattata ttaggatagc |
| 13621 | tttgatttta atgtaatatt agctagtttt atggcttgaa aaacttagta catagactat |
| 13681 | attcataaat acagcactat acattctagc atatggcgtg tgcacttaat ctgaagaatt |
| 13741 | agacattttt tcctgttctg tgatgattga ttgattggtg gtgggggcag aaggtggcca |
| 13801 | gtctttggca acatgtaaaa ttttgttaaa attttgtcaa actgatttat tccattgcta |
| 13861 | aattttgaaa tcagcatttt tttaggggga atatctcgag tttatgagga cagaaagaaa |
| 13921 | tattcttaga aaattgagaa ggttttgtcc ctgtacatgc aaactagggg gtgtttagat |
| 13981 | cagagcaaat gtcttgcagc aggggttgac gccgggccat gtttagtcat caaagcatga |
| 14041 | cttctattct gggaatgtgg taattgagag gtaaatatta tttacaatag cccttataaa |
| 14101 | tctttagttg ttcaacaaaa taacttgcca tcagagttag atgatttagc taaaattatt |
| 14161 | taattgggtt attcctactt gatccaacat ttgattataa tatatgtagt agcgttaaat |
| 14221 | aatttgggat ttctggcctc tggctggctg ttgaagactt tttgttggtg gcggggggca |
| 14281 | tcctaaggaa caacttgccc tctactagca ttctttacta gaaaaagctc ctatttactt |
| 14341 | gttttttttt tcctaaatat gtgttttatt tccttttggc attgtctttc ttgctcccaa |
| 14401 | ttataattgt gagcaaatag caatcgaaat tctgtgtaac ttccagcaca gtttagtcat |
| 14461 | cagagcttgc cagcaagtat gtctattgtg aggaaactgc atttgccaca gctagaccat |
| 14521 | cagcaagtga agtcgtattg tcctctgttt tgtagttgtt ttttcctatt tatgctttac |
| 14581 | tctgattcaa gttcagcatc tcagtgatca taattgtggg gaaaaaaatt cattttgaac |
| 14641 | tataaacaga aaagatacca agttgttgta tttgaaagat tattttagaa tgtggttata |
| 14701 | ccttcaagta aaataagctg taaaataagc tgaagaacca tatatttagg cacattttga |
| 14761 | ctataaaata gatcctctac atataacaag aatagctttt tttttttttt tttttttttt |
| 14821 | tttttttgag acaaagtctt gctctgtcgc ccaggctgga gtgcagtggc acaatcttgg |
| 14881 | ctcactgcaa gctccacctc ctgggttcat gccattctcc tgccccagcc tcccgagtag |
| 14941 | cagggactac gggtgcccac caccatgccc agctaagttt ttgtattttt aatagagaca |
| 15001 | gggtttcaat gttaaccagg atggtctcga tctcctgacc ttgtgatccg cctgcctcgg |
| 15061 | cctcccaaag tgctgggatt acaggtgtga gccacggagc ctggcctata tataacaaga |
| 15121 | attgctttta tatgtctata tgtcacttca taatatttgt ttattattta gctagttatt |
| 15181 | gcctataagc cagtatttag gtattatata aaatctgagg aaaacagttc tataagattc |
| 15241 | agtaaaattc caattctata agattccaag atgtaaagtg ttttaggtat ttaaaagttt |
| 15301 | tatatagaca atagtgactc atttgttatg gtatatgaat atagacaaga acttagactg |
| 15361 | aagcaaaaaa taacaattag ttacatagct atttcaaagc ccatgcagta gttttttgtt |
| 15421 | tgtttgtttg agacggagtc tcgcbitctc ggccaggctg gagtgcagtg gtgcgatctc |
| 15481 | ggctcactgc aagctccgcc tcctgggttc aagccattgt cctgcctcag cctcctgagt |
| 15541 | agcbjggact acaggcgccc gccaccacgc cojgctaatt ttttgtattt ttttttagta |
| 15601 | gagatggggt ttcaccatgt tagccaggat ggtctggatc tcctgacctt gtgatccacc |
| 15661 | cacctojgcc tcccaaagtg ctgggattac aggcgtgagc taccgcaccc ggccagtagt |
| 15721 | ttttaatgtt cagtgaagtt aaaacatctc ccgtccagtt atgctgtgta ataaatatta |
| 15781 | aagcaggaga tattagaaca atacaacact tactgtgcta tttataattt aaaatattaa |
| 15841 | agataaataa tggaataact ataaatattg atactatgat aaaactttta gcatgtctaa |
| 15901 | gttgttcatt ttgatagata caaaaaacca aagccaagca aaataaaaca cacctaaaac |
| 15961 | tttatgaatg ttaacaattt tctatttttg ccataaatct ttggccgttg caccatattt |
| 16021 | tattgaataa aggacagttg ttaagctagg gcttggtcca ctgbitgtca gtatcaggat |
| 16081 | gtgatgattc ttttctgacc catattcttc tctctctttg gctttggttc tcttgtacga |
| 16141 | ctcttctgta ggtggccttg gccacacctg tgaaatatag ggcacagttg tgctgcttct |
| 16201 | actcattgtg aacttgatca tabittttgt attgtgcctc tcttcattgg ctccttttta |
| 16261 | ttttagtgta attcaaagtg ttaattggag gttttaaatg tagttttgac caaattgtgt |
| 16321 | ttgaggtcac atgtacccag tttaaaaaac gaagaaaaaa attcaactca cttcccagcg |
| 16381 | tcctttgcag ctaatgttgc cctcgaatag ttcttgctca taagagaaaa tctagcaggg |
| 16441 | atttatggga aaacttttgc ttttttttgc taaggcactg cttttcttct tgttccctta |
| 16501 | tttccttcca tggaaatcag aaaatgtttt ataattttaa aactttacct ttgtttctca |
| 16561 | aaataacact ttcagactta tgtaaagcaa gattttaata attaatatgt tgcctcgatt |
| 16621 | atggagtaac tttccaaagt tgtactatca tgatcttaat ttattgaccc ttagggttaa |
| 16681 | gataatttgt gtgtttataa cctaacattc tttgcttggc tgatagattc ctttaaaatg |
| 16741 | ttabitgttt atattttgta catactttaa gaagctttat tcaattgcca catttcaaat |
| 16801 | aaataaaggt tctttttttt ttggtaagcc tatacctttg tttcttctag cttttaaaag |
| 16861 | tgttaatagc gtgggaatga cccttgacca tctctgattg tttgggaaat ggtaactaga |
| 16921 | aagaactgag agaggacaaa cttggatgag aagtctcaga actgatagta aaaacaaatg |
| 16981 | caaacaagaa aatatattac gtacttcatt cagattaata agtaattaaa cacttgaact |
| 17041 | attcaaaaat ctagtttgag tctaggcttt tgcaagcctg aatttgtcat cataatcatc |
| 17101 | aaaattagaa attacgaaag aatgttaatt taaatttaaa acagctggaa atacaataca |
| 17161 | tggcctataa gcttatcttc tcatctgtca acaactgctt gcatatgtca catgaactgt |
| 17221 | tttaactgca attacaaaag tcaatggaat gtttagaggt gattcaaaaa atgtgattgg |
| 17281 | ctgacatata gagttatcct aagaaacagg ctgtccaaca caattttaaa tatactcaag |
| 17341 | ctcttttata ctgattaaga gtttcaagtt aaggttttgg gttaaaaaat caacatcaaa |
| 17401 | tgataaataa gaaatataat cttgtttaaa ttatttattc taatagttta tttatgaaca |
| 17461 | caacatattt ctctttcatt actttttttt tctcagttgt aaaattctag agctggagcc |
| 17521 | cataggccaa tccgtagtat atctgaaatg attaaaggtt ttatacttga caagccctct |
| 17581 | gtctgcaggt tacttgcttc tacttggagc agtggattta tcatcctcca ctccagggta |
| 17641 | aatatctaaa agtcacttct gccacgttat ttcccatctg gtagattgtt ataatacctg |
| 17701 | tgagtcagta ttatctgcac agtgtatttc ctotgctcaa ggcactttga ccatatgagg |
| 17761 | tgttcacatc tgatcaatcg ggctgaagct tgccctagtc tgaggctgga ccaattgatc |
| 17821 | tctaacgata ttcttacctg acaatctaga ggatacaaat caagatgttt caagtgcaga |
| 17881 | aagcaacagt aaagcataag ttcttttttt ttttttgcat tctttttttt tttattatta |
| 17941 | tactttaagt tttagggtac atgtgcacaa tgtgcaggtt agttacatat gtatacaagt |
| 18001 | gccatgctgg tgcgctgcac ccactaacaa gcatatgttc taatgtgtaa tatatcttca |
| 18061 | agacagtctg gaccatgaag tgtattttta cttattgagt gtatatggga ggatcatttt |
| 18121 | ataggattgg ttatattttt ccatttcttg attctttgat acttaaattt ttggtttcat |
| 18181 | attctcctct ttcacatgtt gtccccattt tacatatgca aagatagttg tttgccacaa |
| 18241 | aaataaacat ttaacagact ccaaacacat agactgtgta attagcataa cgaaataata |
| 18301 | gtggctgagt gacgagcaga agtgattcac tcatttggct ctgtggcttt caaagttatt |
| 18361 | aatgatgtta catattcttc tctattttat ttaaaaacta acactcataa agttaattct |
| 18421 | cataattttt gcbjggttta ataattcaaa atatgaatca aaatttttat ttattatgca |
| 18481 | gtttcattct attaaaatta tctgctaaat taatattaag tagtcctata gcatatatta |
| 18541 | tttaataatt gcaagtagtg acatatcata aataaactgt ataatatgta ttattgattc |
| 18601 | tgttattttt cctagcaatg cacagggaac cagtaaattt cacaagcaga gaatactaac |
| 18661 | ttgtcattta tttaatattc taaacaaatg aagccgcctc tataagtgaa ttttctggac |
| 18721 | ttctaaagat gagcattgtt gagtttaata actcaaattt ttattgtgtt aagtaaagta |
| 18781 | tattaaatat aacctcaccc taatgactca gctgtaatta aaaaagagtt cacgaccagc |
| 18841 | ctgggtaaca cggtgagacc ccatctctac aaaaataaaa aataaaaatg aaaattaaaa |
| 18901 | aaaattagcc aggcatggtg gcatataccc aagtactccg aaggccgagg gtggaggatc |
| 18961 | gctcaaacct aggagtccaa ggctgtagtg acctgtgata gtgccactgt actccagcct |
| 19021 | gggaaacaga gcaagaccct gtctcttaaa aaacaacaac aaacctacac atgaaaatta |
| 19081 | ttgctgcttc ccatcaattt tcagtgctat ctttatttaa cctctctact atttgccttc |
| 19141 | actttttaaa attttgcttt tattcttctt tctttggtct ccttctctaa aatttttccc |
| 19201 | ctgcttctgt ttttttgtat actaggaaga catttattat ttttataggt atgatcaaat |
| 19261 | tgtaaaataa gtttatttca ttctctggtg atttcactaa ctattttgag agtatcagtt |
| 19321 | aaaatgggat ttgtttgtgt gtaacaaaat ctaactgtag tggctaaagc aaattggagt |
| 19381 | ttatttttct ctagtaacta aaaggcccca gtgggcgttt aagggctggt accacatgga |
| 19441 | gcaacatcat atcatcaatg tccagactcc tgtgcttttt tcacttgatc atttttagag |
| 19501 | tttggccttc tgtgcttcat tcctcgtggt cacaacatgg ctgattgttg tgcagcttta |
| 19561 | tgtctgattt caaggaagaa agaatagtga gagaggaggt tgttgcctta acacattcaa |
| 19621 | accaaagcaa aagttttctc tgaaatcccc agtagatttg cccttacatc ttctcaggta |
| 19681 | gaagtgcatt tttgccattc ctggctgtaa gagaagccga taaagaaaat acatgcactt |
| 19741 | tctaacaata ttgaaattct tttcacaaag aaggaaagga gaatgaatgt actttgggta |
| 19801 | ggtatcgtgg tctgttttat gttgctgtaa atcacaaact ggatgattta taataaaaag |
| 19861 | aaattagttt tcctcacaat tctgaagact ggaaagtcca gggttgcagg gctgtgtctg |
| 19921 | gtgagggcct tcttactgtg tcttctcatg gtggaaggca tcacatcagg agagatttct |
| 19981 | ccagagtgca agaacaggtg gaactttata taacaaactc attcctgtga taaggagccc |
| 20041 | actcccaaga taataccatt aatccattca ggtgggcaga gcctcatgac ctaatcacct |
| 20101 | tctgaaggtc ccacctttca atgcttttgc attggggatt aaatttccaa cacatgaagt |
| 20161 | ttggggaaca cattcacgct gtagcaggag gcaaccacat ttgtgacatt gcgtcattgt |
| 20221 | actttctaga tttgttttct ccaggttgtt tgcaacgttg atgtactctt tgtataccca |
| 20281 | cctgaaagat taatgttact gaagtattgt gtttaagaaa gaaagatgaa tgctaccatg |
| 20341 | taagaccttt tgactgtcca aaagattaaa attccagttt ggagaggtag cacttacatg |
| 20401 | aaaaccttat aaaacatgag aacttaaact tgctaatttc attgtgtcaa atcgcataac |
| 20461 | agagaaagga aaaacttgaa ggccactcct cttgaaaaag tatttgagta gtgtcgattt |
| 20521 | cagtgtaaga ccaattaaat aatgtcaaat taagtaaata taacattaaa atattttctt |
| 20581 | taacatattg gtgttgattt cacttttact ctgtaatttt tgtgacattg gaaacaggaa |
| 20641 | atattcaaat tttgccttct tttggatcgt ttcctctccg tttcttaatg tgtaaaccgt |
| 20701 | aatagggctt tctgcagcca acgtgctcat tcttttcttt ctgttaggct gtgccttttc |
| 20761 | tgagaacagt tggtactgat ggagatttct gttctttttc ttcacacaag tgtcatatga |
| 20821 | aaattggggg atcagctatt ttcagatcac aggctcctct gataacagaa taccataatt |
| 20881 | ccaactttcc tgtgttgatt tgtagatccc acactgtgtg atcatgacaa acatctaagc |
| 20941 | ataagagggc gatgaatgat taaaatttat tcactcttcc cataaaacac ctggtacaga |
| 21001 | tgcagtgtgt tgtcctcaca gaggaaaaac agtggttcct ccttccaagt ggcgtgtcca |
| 21061 | cagcactggt accagataac aagaacctta gacttttctt gttgctgcag tgtgtctacc |
| 21121 | tgtgcctctc ttaagtgtct tacacgttac tcacagagaa agaaatacaa aaatggaaaa |
| 21181 | cataagctca caaaaatgca tttagtgcat ttatgatgtt aatggaaacc ttggatacag |
| 21241 | tcctctgtta tttccttact actcttgata ttttacaata ttgctttatt attcaaattc |
| 21301 | ataatcatat atgtgttaaa caattttttt tggtaagtag actgtgtatc aaacttaaga |
| 21361 | gggatttgac atggaaagac atttaaaaga tggcagaaaa cagctattat aagggcattt |
| 21421 | gaactttaga tattttccgt tggtcagttt ccatagatca tcatctgatt cactagggtt |
| 21481 | tggccagttt atattattta aattgtttcc cctgcaactg tagtattttc tttaatgttt |
| 21541 | tgaattattc ttaatgtgac ttgaataagg gtaattgtca catatgctga tgttttccca |
| 21601 | ttaggatgaa aatatttaga aaagctgtac tagcaaaaac caggttaact tgttttcaaa |
| 21661 | gtagaattta attattttat ttcaagcttt gattcctttt ttaaaaatta agtaaatgtc |
| 21721 | cttgagagca atacctttgt gtgtgtgtgt gtgtgtgtgt gtgtgtatca gttacttgca |
| 21781 | ccttcaattg aatgaaagac agtagtaggt tgtattatgg cagaggggta gaagaatgga |
| 21841 | cattctcatg ggtatctcaa aggtcaagtc agaattggat tccctgtgga tggaagagag |
| 21901 | gagtggagaa ggtgcttctc atgtggaaaa acaagaaaag tctatgacag gcctcagtgt |
| 21961 | ttgccagctg cagtggaatt ctcatagctt gtattgaact ctgtgtccta atcttctgaa |
| 22021 | accacctcaa gagagtatat attgctaaaa taggagctca gctatttttc aggggcagtg |
| 22081 | atccagagga cactataaca gaaatagata atttcaaagt cgaaaatata ttagatacta |
| 22141 | tttttattct ctatctggaa agtctgtata gaggctttat tctggtctgc tttctcagat |
| 22201 | aaatatccta ttcaggtcac tggaaataat atgtcaggtt ttaaaagaga cttcatatgt |
| 22261 | agccaaataa acctgctaag catatttaga aaatcatgct agtgactagt gtcttaaact |
| 22321 | gtttccacaa aaacaatgct gttaatagta ggatttaccc ttttgcattg gaaatgagtt |
| 22381 | gtcaaggtta aaaagatgag tagccagata ttcttgctaa acatgttttg agaagaaatt |
| 22441 | taataatata aagtttttgt taaatgtggc ctattaattt taaacaataa tactgactga |
| 22501 | agtcattagg tagctgtgga aagaagttag cctggttttt actaatgtag cttttctaaa |
| 22561 | tattttctgc ctaatgagaa aagagggata agatccaact acaattggaa gcttaaatat |
| 22621 | ttaatcaagt ttgcagaact actattaaga tcatatgtaa ctatcagata ttttttaatc |
| 22681 | tgaggacttc tttctagtaa atagaaattt cttcccaagc attataggaa tatgtcttat |
| 22741 | tgacttattt ttttggcatg ggttactagg aaataatatt ttcagggagt tcagggaccc |
| 22801 | agatttgatt cccagataat tcagattaac cttctttaat cattctattt tatgttatta |
| 22861 | ctggagagta cagggtaggt tgaaacagca taaactgcca aatcagaact ggatttgaat |
| 22921 | ttagtgatgg gcctcaggag ctgtatgacc ttaattctgt gagtcaggct ttctgagtca |
| 22981 | ggctgtgaac tgggcaaaat agtgtatacg ttacaacatt gtaacagagc tcatttaaag |
| 23041 | cattgtctca tgttagctac tgataaagca ttagttccca ctccagggcc tgttagaatt |
| 23101 | ctaactccat ccctgtgagt catgttcatg ctttcgtggt tctcatttga ggttttgtga |
| 23161 | ccaaaggccc cacagatgga ataaaattaa tctaaatagc catttattaa tgtaatatct |
| 23221 | gctagctaat tacatattta ttaaatataa ataacaaata gctccaagat accagtgacc |
| 23281 | tccatgttgc taaagccaac agttattaga acttctctgt tctgtgagct tttctgtgat |
| 23341 | ggtcacaggt gagaccgcaa gaggacacac aggagaggca caatgaaaca aagtttatta |
| 23401 | tactcatagg tcttagacag gaggtcaccg catgccacac agggtcacag ggtgtcttag |
| 23461 | tttgttcagc ctgctataac aaagtgtctt agactggata atttataaag aacagaaaat |
| 23521 | tcattgttca tagttctgga ggttgggaag tccaagatca aggagccagc agattgggca |
| 23581 | tctgctgagg gcccactctt catagatggt gccttgttgc acgtccccct cacatggtga |
| 23641 | taggggtaag gaggaagcag gctctcccaa gcctctttta taagggtacc aatttattct |
| 23701 | tgagggctcc accctcatga cctcatcatc tcccaaaggt ctggcctctt aataccaaaa |
| 23761 | cgcbjgggtt gatattttaa catgtgaatt ttggagggac attgacatta cagaccacag |
| 23821 | cacggggggt ggggggtggt tctccatgtg gcagaagaca ggaaagagga gagagcttat |
| 23881 | gccacagcct ttactggagt ttcagggtaa aggcaaggca gagtagagta gggtaaacag |
| 23941 | tttagaactg gctggtttga atactttcag taggctctaa ggtataggat taatccctag |
| 24001 | ttgcttgata cctgacagtg ggaaattaag gcagaggaat attgtctcct ggggtatata |
| 24061 | gccagataaa ggaggtatgg ctctggattg ggtaatttgc ataccaaagg tgttctccct |
| 24121 | gctgaggttt ttgctgtctg taaggattgg cagcccctgg agggccatct ctcccaagcc |
| 24181 | ataaactttt ttttaagatg tojaaatatc atagtactca gaaaaatttg aaatatatat |
| 24241 | atatatatat atatgtataa aacatcctct tacttggcag catttacaat gtttgatcat |
| 24301 | tatttttcag ctttgtcttc aatgcactca ttttacctca gtggtggtta ctccatccca |
| 24361 | ttctccactg ctggctactc tccttgaact tttaatgtcg aagtgttcag ggctcagccc |
| 24421 | actgtcctct attatttttc atttctattc actctcttag tgatttaacc cagtcccatg |
| 24481 | gttctagata tcttcatatc tgtatcttta gtccaaatct gtcttcttaa ctttaaaata |
| 24541 | taactagctg cotttgtcat ttccactcag atggctaaca gacacttcaa atttaaacat |
| 24601 | tcccagttga aatttttatc tctccgtttc tgatcaaatt tgctctagct ctacctatag |
| 24661 | ccttccctaa ctcagtcagt ggcaacaaat tgctccgagt tggtcaagtc aaaattcatg |
| 24721 | gtatcatcct tgacttcttt ctttcctacc ctacattcag actcatcagg gaatccaatc |
| 24781 | ctcttggctg tgtcttcaaa aatataacca gagtctaacc acttgctaca tctctgacct |
| 24841 | gagccaccat cgtcttccac ttggatcagg gcagcgttct gtttaccagt ctcactggtt |
| 24901 | cttatcttca cctccctaga gtgtattctc aactgagcag aaagaagaat ccttttagga |
| 24961 | tgtaagtcac attatattcc tctcctgtta tatgtaaggc cctagaatag ttccctactt |
| 25021 | cacaaaaagt aaaaaccaaa atctctatca agtaatagta gtcattgccc tggcagtgtt |
| 25081 | tcaattaaaa gagtttaacg actggttcat tttatagagg tgtggacagt gtcaaggaaa |
| 25141 | cagaaaagaa caaaagaaca tgaagcatcc aggtactatc aacagtggga agtcctaact |
| 25201 | accctagtcc tgcaggggca aggtgagcga atagtgctat cagccctgga aattgctggg |
| 25261 | cactgtagga gaggggctgt caatagaagc tctaactgta gagtgcacac acttctctca |
| 25321 | ctatggtgag gcaccataaa tgtggtgagg cagagggaga gtgaggagaa tgaatatcca |
| 25381 | acctattttt tcttcacatc ccagccaaat acttggcatt gttagtcttt tttattttag |
| 25441 | ctattgtggt ggtgatgtaa tagcatccca ttgtggtttt attttgcctt ttcatggaaa |
| 25501 | ctgatgaagt tggacatctt ttgacaagct tgttgcccat ttggatatcc tcttttataa |
| 25561 | aatgcctgtt taagtgtttt gttcattttt ctttttggtt gttttttttt tttttttttt |
| 25621 | ttagatttct acaattcctt tacatgattt ggttgccagg ctttttaaag ctgtgtgtat |
| 25681 | tgcagatatc ttcttccatc tcttactggt cttttttctt tctttctttc ttttttttta |
| 25741 | ctggccagat ttctttaatt ttaatgtaag gtgatttttt cttgtttttc ctctatgatt |
| 25801 | aatatttttt atgtcttgtt taagaaacat ttgtctatcc aatgttatga aaatagtctt |
| 25861 | gtagaagctt tattgctttt tcactttcag atttatattt acgatcaacc tggaattgat |
| 25921 | atttgtgtag tggggagggt agaaatcaag actagttatt tttaatttgg ataactaggt |
| 25981 | aacctagcat atttctctgc tgctctgtag cattaccctt gtaaataaat catgtctcta |
| 26041 | tacggtttct ttctggactc tgttttacga ttgtatgctc tctggcatta gtatcacact |
| 26101 | gcctgaaatt ctgaagttcc atagtatctt ttcttttcct tgtttttttt tttttttttg |
| 26161 | agacagagtg tcattctgtc acacaggctg aagtgcaata gtgcaataat ggctcaccac |
| 26221 | agccacaatc tctcagggtc cagcagtcct cccacctcag tctcctgagt acctgggact |
| 26281 | acaggtactc accactacac ttggctaatt ttbitgttct tctgtagaga taaggcttca |
| 26341 | ctatgttgcc cagactggcc ttgaactcct gggttcaatt gatcctcctg catcagcctc |
| 26401 | tgaaagtgct gggattatag ctgtgagcca ccatgcacag cttcattgta ccttaatatt |
| 26461 | tgacagaaat acctacagtt tgttctttaa tatcaccttg aatatagata ttgagattcc |
| 26521 | attgaatcta aaaattgatt tggggaaaac tgatatatta gcaataatgg gctttctatt |
| 26581 | ttggccttat agcatttatc ctattatata atcattttta agtttttctt tttgtgtaga |
| 26641 | gaccttgcat atcttccttt toggtaccta ggtatgagac attttggaag ctatggcaaa |
| 26701 | ggatatttgt ttttgcattt cattgtcttt ttttttctgt gtatagtatt ctaggttggc |
| 26761 | atttattttc tatattctaa agattttttt ccatattacc ctctgttttt tattacatcc |
| 26821 | actatcaatc ttattgttgc ttotttgaac aagaaatgat tttcactgtt agcatttaaa |
| 26881 | attctgtctt tggggccggg cacggtggct cactcctgta atcccagcac tttgggaggc |
| 26941 | caaggcaggg ggatcacgag gtcaggagat tgagaccatc ctggctaaca cggtgaaacc |
| 27001 | ccgtctctac taaaaataca aaaattagcc gggtgtggtg gojggcacct gtagtccagc |
| 27061 | tactojggag gctgaggcag gagaatggcg tgaacccagg aggcggaggt tacagtgagc |
| 27121 | cgagatcacg ccactgcact ccagcctggg cgacagagcg agactctgcc tcaaaaaaaa |
| 27181 | aaaaaaaaaa aaaaattctg tctttggatt tcagtagttc tattatggtg tagtatttta |
| 27241 | gatgtagctt tcttbitgtt taatctgttt gatgatcata gcaatttttg aatctacagc |
| 27301 | ttgatgcttt ttgttatctt ggaaaatcct agaaaactac ttctttaaat atgccttttt |
| 27361 | ctttatagtc tctatcctcc agttaaatat atattaaaca tttgcagtat ctgctctata |
| 27421 | tctctatgtc acttttccaa tcatctatgt ctattatgct tttttttttc tagttttctc |
| 27481 | tggatgtttt ctactgatct gtcttccagt tcactaatcc tttctttagc tctaatatta |
| 27541 | ttaattccat atattgagac ctattttcag ttattacatt ttacagttct caaatttctg |
| 27601 | ttttgtaaaa taaattctat tctttgctca aattcttcat cttcctttct gttttctcaa |
| 27661 | acatactagt tgtagtactt taacaatacc tatttctttt ttttgaggca gagtcttgct |
| 27721 | atgttgctga aggtggtctt gaatttctgg gctcaagaga tcctcccagt tcagcttcct |
| 27781 | gagtatacaa tacctatttt aatatcaagc acaactgaag tttcattttt attgtctatt |
| 27841 | ttttctattt ttttgttagt cttatttgtg gatatttttc ttatttgctg aaaacttttg |
| 27901 | attgaatgtt tgatgtttta tttaaaaatt ataactgtct agactatgca gttttgcctt |
| 27961 | tctagagagg attcagtgta tcctctggta atcagccaaa aggcagacag atcactccag |
| 28021 | ttccattaga atatgacatg gctagaagct tttctgaagc ctgbitgtat cagtctggta |
| 28081 | tggcctaccc actttccttg ggagttgtct ttcaggatac ccattcagag cctatgaatt |
| 28141 | tatgagattt tttttctttg gtgggttctg aacttcaatt tttgtaacct ctgcactatg |
| 28201 | agactgttgc atacattctt gtgcttttca gaagatattt gcttggcttc tttgcttctt |
| 28261 | accatggata atttgaaaac ttagtgcctc aaaaggaaaa ccttaagtat cagggaacct |
| 28321 | catttctctc ttgttttgtg taccctctgt ccgtgatctt agcccctcaa atctgactgc |
| 28381 | ctttaaaggc ccaaacttta atgttttgtc tctccagctc tgtgaaaatg ctggcagtct |
| 28441 | cacttttgtt aactctgttg ttttctgcct ggattttcag cctcttacct atccaaggac |
| 28501 | tatcatatta tattacccaa gggaaaatgt tgctctcata atgtctgctc acctctctta |
| 28561 | ctttatgttt ctgcccagga tcttggcaac tgaaagcttg gctgtctcta tggttatatc |
| 28621 | ttcaaatagg tgtttgttgc ttttcgtttc atctcatatt ttctagttgt tctcagtggg |
| 28681 | aacattgttt tgtcacaagc tattccatca tggtcagaag tggaagttgc taagtcaact |
| 28741 | accttgataa ttattgtgcc gttagtatgg cttagtgact aagggaacac atttttgttt |
| 28801 | ggataggcct ttggtttaaa ttcctcttac tatgtttgag ataccgttcc attgaaaact |
| 28861 | tagttttatc acctgtaatc agaaaaaaaa agaccttttt ttagaggact cttaggagga |
| 28921 | ttaattggaa aatattcacc taaagtactg attacaataa ccatcacata gtaaatttag |
| 28981 | taaatatgtc tcaaatgata cagaaacctt atggaacctg taaggttaaa tcatgcattt |
| 29041 | ctgaaagtag taataatatt tactttactt ccagtgggtt aatatgaacc aaattatttg |
| 29101 | aagatatttc tattaaatat tgattacgtg aaagaatata acatatactt aagatctata |
| 29161 | acaataaatg aatgccagtg taccgctact caagttaaaa ataaaatact accagtccca |
| 29221 | ttgagtttta tgtatatgta ttccttataa atatttcatt gagtttttgc ttttgaaatt |
| 29281 | tatgtaattg gaatgatgtt ctatgcacct ctttgcaact tgcattatta taacttgctt |
| 29341 | tatcttaata tcatctctgt gattcattca tgttaactat agtttttttt cattttctct |
| 29401 | tattttcaat gtggtgagat tatgttgtat aatatctccc aaatatgcat ttattattaa |
| 29461 | tagaaatggc gtgctttttg atctttcact tttggtcctt tttccttgga attgtatttg |
| 29521 | ggaattagtt gaagatgaat ttctctagag cagctttttg tttgcttgtg ctccgcacct |
| 29581 | gtggacacta taaatagaga ccactttcaa aggtattttt ggcttaagtc tgctcgaacc |
| 29641 | acacagatag tgttacttca gaccacaact aggatgagag ctttctcctg attatatccc |
| 29701 | aaggaggaga tttctttctt ccttttaccc agagcaaatg ttgagacagg caaatttcct |
| 29761 | tgcagtctcc ttctgtagat cagagttatt tttctagttt gcccttatat tgagaggaca |
| 29821 | ctatagattt gttctagctt aacttaggga actactatta gactctttaa gagagctctg |
| 29881 | ggctctgttg cctgttaaac tgtcaagttc aaagcccagg ttcaccagct ggagcaactg |
| 29941 | ttccagggtg aatatgactt agtgttgaat actctctgaa ttatttcact ttatttttgc |
| 30001 | acccctagga atactttacc ttcttaatag atctttatat gcagacacac atatgtttaa |
| 30061 | acatatggaa gtacatatgt gtgcatgtat gtagataaat agatagatgc actttttcag |
| 30121 | aaagagtctt ctaccgaact gttagaaaca gaaatgtctt aagtctgatt tgtgctgctg |
| 30181 | tgacagaata cctaaaactg ggtacatgat gaaaaataga aatctagttt tcacagttct |
| 30241 | agagattgaa acgttcaaga tcaagttgct ggcaggtcag gagcctggtg agggccccgt |
| 30301 | ctctgcttct aaggtggcgc tttgaaggct gcgtcctctg gaggggagga atgttgctcc |
| 30361 | tcacatggca gacggacaga agagcaaaga gatagaaccc atgatacatg aaagcccttt |
| 30421 | tgtaaaggca ttaaacccac caatctgggc aaaggcttca tgacctaatc acctcttaaa |
| 30481 | ggccccacct ccccccatat tcttacattg gcaattagaa ttcaacatga gttttggagg |
| 30541 | ggacattcaa actataccaa gaaataactg attcagtttt tataagaaat tttagaactg |
| 30601 | tccctaagac ctggtgagtt tcaggcctca tgttctgagc ctacatctga catcagctac |
| 30661 | catagtatcc gctgtgcagg cagagcctct tcagtcatag gtatggggtg aaacagattt |
| 30721 | ccacctcttc cctgagcttc gctggcacag aataaatgca ttctaaagaa aactgatacg |
| 30781 | tcagagacat ctgagcttac tcttaattgc tttcttacct ttctctgtct tgggccagat |
| 30841 | tttcttccag gctgatggct tcttccaact ctgaattcta gcactctctg ctgtttcatt |
| 30901 | ttgtattcca tgccttcgtc tcttctctga tcccttccat ctgcctgaaa gcacttcctt |
| 30961 | tttattattt ctgtgtccta taataataaa gttaacaaaa gtgttaagta tatgtttatt |
| 31021 | tttccaaggt tacataggca catgtataat gtagggaaac tggctgacaa tcagagacag |
| 31081 | aagacacata cacgtgggcc cacacacatt cgttcactgt tgtccttaat gcagtattca |
| 31141 | acattacaaa ttactgtaat cttaataaaa ctgcgacatt gttttccttg tttatttagg |
| 31201 | gagcaccttt aaaaatcatg tatttgctga tttattcatt cactattgtc cttaatgtag |
| 31261 | tattcaacat tccaaattcc tgtaatctta ataaaactgt gacatagttt ccttgtttct |
| 31321 | ttatttaggg agcatctata aaactcatta tttactcctc agaaaacttg catgggcata |
| 31381 | tagttatgaa ccagtttgaa tattatgatt ttatattcac aatattttta tacttatgat |
| 31441 | cctaggctaa ggatatttat attagaatgt tcgctgagga cttaaataag ttctcactga |
| 31501 | tacttacact gaatattatc tcaatgtact tgagagaaaa ggtattgcaa gtaaaggtaa |
| 31561 | atatatgagt acatcaattg tataatttaa ttttctcaca attttaggac aattttgtat |
| 31621 | aggatctata atcatatact tttttaaata ttcacttgct tttattaaat caatcacaag |
| 31681 | aaaatacaga acgttttccc cttccacttc tgaagtggag gaaatcactt caaattcatg |
| 31741 | ggatctttga actttgccca ttgggccaga cttgcagtat cataaacttc tttttcctac |
| 31801 | ctatgtatga ttttgccatg tgcgaaacaa tcattgctag taccacgagt gagtgatgat |
| 31861 | aagcttagaa tacatccagc taagatcagt gccatttgaa gctccctcaa tatcgcattt |
| 31921 | cttcggttct ttaaaaaaaa ttcattgttt tggagtcagc atattattaa tgaatggagt |
| 31981 | atttgagggg aataaatatg actttggcaa tatcacatgc atgggaaaaa ttggctagag |
| 32041 | aaagggctaa gtctttcatt ctgtgtttta gagaacagct ttagctcgta tgaaaaaatt |
| 32101 | ctggcataga tatgtgaggg ggagtgttgg ataagaaaag gaaagagaaa aagcttgctg |
| 32161 | tggagtggaa ttctcatcac atttctttct tacctactac tctggggaaa cttcagttac |
| 32221 | agggctgata aatatttatt aagaatatat agacagtata acctaaaaac attggaagat |
| 32281 | attttagcga ggcttgagtc agattaaatc taccaaccgc taaaagatgg ctttgcctag |
| 32341 | agaaattctt ttttctttgg gagcagctat tagggaaaag cctattgcct aatatcttaa |
| 32401 | ttgaaaccta tgcataaaat tcaattaaaa atggcctata ttttgaattg tttttcaagt |
| 32461 | tacagaagaa ctttaagatc tttgtaggta atttctaaaa agcataaata tcttaaaata |
| 32521 | tatatctgta ctatcaccat taaaacttac cattctttgc tctatatttt ccaaagctat |
| 32581 | attcagagaa aataaaacct attatttcat agcctgcttt aaaaatatct cttaaaatac |
| 32641 | gctatttttc atctcctgat ctatccctca agaatatgat tttaaaactg cattacctca |
| 32701 | tttcgactta tttgttttat gtcctccttg ttattaacta tttttaattt tttctgtgta |
| 32761 | aaaacactta tttctttaca tattttctct aaatttggaa gctatgcctt cgtcaatgat |
| 32821 | accatgttaa cattttaaat ttttaaaaat attttaatat attttattca aacagtccca |
| 32881 | ataattaaat ttatttcact ggcaaatgcg atataaacca attgctgcat ctctcctctc |
| 32941 | caaaaagcat gtcttgttct agtgatgtat ttggagatag aagacttaaa ttattttatt |
| 33001 | tttttttact ttttaaaaat gagaaatgaa aactojgcta tatgcatggt gtacactgtg |
| 33061 | acgttttgat tgaagtacat tgtggaatga ttaaatcaaa ctgattagca cattatcatc |
| 33121 | tcacatactt atcatttttt gtgatgagaa tgtttgaaat ctactctatt attatttacc |
| 33181 | atagtcacca tgagtatatt acatcttcag aaattatccc ttctgtctaa ttgaaactgt |
| 33241 | accctgtaca caacatctcc ccgttgacca ccccaccagt ccccgagccc ctggtatcca |
| 33301 | ccattctact ctctgcttct atcatttgat ttttttaaat ttctacattt aagcgtgatc |
| 33361 | atgcatattt gtctttttgt gcctggctta tattgctaag cataatgccc tttagtttta |
| 33421 | ttcatctttt tgcaaatggc cggatttcct tcttttttat ggttgaacaa agtacctttt |
| 33481 | ttccccccac tgtcccaaat atatgggctc aacccccaaa ttggcaggtc taagaagtct |
| 33541 | ttccaaaggg tagtctatta catttaattt ctaaacataa gttgaagaaa agaaaattta |
| 33601 | tcctgacagt tccaaagttc aataaaaagt atagtttttg agtttttact tcagtaaggt |
| 33661 | attattttag tttottagct tttcagaaag totcagtott ttcaatggga aactctctta |
| 33721 | gggcatttaa aatataattt gctaacaatg aacttttaga tgagtaatcg tggctgctat |
| 33781 | cactggccct ggatggcagt gggatgagct tgcaatgcca aggatacagc tgagcaaatg |
| 33841 | ccactggaag ctaaataaca tgaaagaaac cagggttttg ttgtttacaa tggccatgtg |
| 33901 | atggtatgag tacaggaaag ggctagaacc tgggcatctg aggagaaaaa gcattgacag |
| 33961 | catggatgta aatgacgact ggtatttgaa tgcaatgtgg ggccagaggt agacatcatg |
| 34021 | gaaaagtatc agactttgca tacaggacac aaactaaagt aatcactagg gttagaagag |
| 34081 | gagcccactt tctggagata ggttactcag agcaagaaat gcagcaagtc agaaagctgt |
| 34141 | cgatttggga agctacttat taatgtacct tacatcctcc ctgacaacaa tcgagattga |
| 34201 | taaccacatt taattcagtt ctagtcagta agacggaggt tttctagcac cagctgccaa |
| 34261 | gattaaaaaa tgtgcatgtc ctagctctgg gaagtgtctg gtatgattga tgcttggtac |
| 34321 | ttgttcatct aaatatgaat ttactactgg gaaagaaatt aaacttctag atattcattt |
| 34381 | ggtagatcgg tgaggtgact gaagtgtggc aaacctcaca atgattatga ataaacttta |
| 34441 | ttaagaaaaa ctgaggcaat taacttattt gttcttcaaa actgaggaaa tatttgtcct |
| 34501 | cacatatatg atagaatatt gtttgctgct ggtaaccaat ctttgctttc ttctactaac |
| 34561 | aacttgtttg tcaatatgtc ttatttctca ctctaataag actatgtcta aataacttct |
| 34621 | ctcctaaggg ttaaaaatac aaagaatttt cacacataac caagtaataa agaatgtata |
| 34681 | ttattgaatg aatgagtaat ttacaaaaga aagtgttgag aagtagaata cataatttca |
| 34741 | gatttatgaa atatgaaatt tcagattcag gatctgtcca gtggagttgt gtttttactt |
| 34801 | ttatggggat taagtcaaag gcagtatatt aaatataatg gaataatatt cccccaaaac |
| 34861 | atggtaaatc tatactttcc ctgaatataa attttccttt aggacaccaa atctttaatt |
| 34921 | aggttaatta taatttcagg tagattaaag aggactattt ctctttaaac ataaggataa |
| 34981 | ttatatgaga attaaatctg tgagaaagaa ttggaacctg aaaaagacaa tggagaaaac |
| 35041 | tagcagacgg tatgttcaac tagaagaaag agaatttaaa agttaaaccc aaggtggtga |
| 35101 | ataatcacaa aaattgttaa tgaagagcac tttttttttt ttgctgatgt tctttaaagt |
| 35161 | tttttagccc tggtaataca tatttagaat tattttagaa tttgattatc tatgactgta |
| 35221 | ccaatattat tgtgttagca gtatgagtct tgctttctat tattgaaatc gttgttaaca |
| 35281 | gatcaaatta cccattatag ttttatgctc tgtgcataca gtggcatgac ttagattaga |
| 35341 | agaggtggat aabittgttc tcatattgat attataagct tttatcacag atctagggac |
| 35401 | ctttgtcttc taattcttgt gtgtttatta ttgcttattc cattcaattg gcatgtaatt |
| 35461 | gaaatggaat tgaagacaag tacacatgtg tgttccttta tggcccctaa cattcactgt |
| 35521 | ttagttatat aggtctagat tatgaatggt gcctagaaaa aaaagtatga ataaggaata |
| 35581 | attaataatg aatacttatt tccatcacct gttaacatac tctgtccatt tattcctcat |
| 35641 | tttaccgtct acatttaagt tctcttttct agccaccaag cattattgtc tagctaccat |
| 35701 | ctactgagtg tttaatatat gtccagaatt gagcagagtg ctttgtatgt aattcatata |
| 35761 | accaatctag caaacatcct tgatttttca ttttacctag ttgcctaaac cttccagcaa |
| 35821 | tctattagga agtcaaaaag cttctcttcc tctgaaatat attccaaatc catccatttc |
| 35881 | acctgttatt cttctaggct aagcbgtcat catcctttgc tctggtgatt gcaatagaac |
| 35941 | ctaattgtcc tatctttttc ttgotttaca ccottaaaat ctaatctact tcttgaaatc |
| 36001 | agggtgtgtt tcattgtaaa tgagataata tcatttctac atcttaacct agcagtgact |
| 36061 | tctttccatc atatctggac taaaatccaa actctgtatg gatgataaga cctatcagaa |
| 36121 | ttggagtacg tttttttcat ccccatcaca tgccatgccc gttcttttca aaaggctacg |
| 36181 | gctctttctt gtctaacatg taagcacatt cttttcaaag agcctggaat gttcttccct |
| 36241 | agatgggcat gactggctct tttttgtgga ggtcccagct accaattcct taagggaatc |
| 36301 | tacccttcct tatctgttct aaagtagcca cccagtttct atcatgaccc tcagtttatt |
| 36361 | gtcatcaaca cttcattttc ttcatttatt gtttattcct taattgattc tacttcttta |
| 36421 | gtagaaattc cagaagcttt aaagtgtttt gttcatagct gaatgcccag aacctagact |
| 36481 | aatttttgac attcaaaaaa tagcttataa gcatttagta cattttatta aataagaaaa |
| 36541 | tagtatctcc tctaatctca gaatattata aatttatatt gttattatca cttaatagat |
| 36601 | ttaaaaagtc atgaatgtgg gagataagcc cagggttatc cagttatttc agtggcagag |
| 36661 | tcagaatttg agctcatgtg tttcagacct tagaacttta cctatagtct ttgatgtcta |
| 36721 | catcacatta tgctccctcc catgtaccaa attattctct taacttacta tatcaactaa |
| 36781 | tatatctata aaataatctc tggcatagga atatagcatt catataataa atcattactg |
| 36841 | taatgcgttg acaatgcatt acagtaaata atgcattact taacctgata cattattcag |
| 36901 | ctgtttagat gagtcatcaa cctaaaaata tctgactggc tgtacagtaa tgtggtaata |
| 36961 | cattcatcat agagaaatta acgtatgggt tgaatattca tagtgatatg aatacaaata |
| 37021 | tgbitatcag taggattatg gatgtatgat agtttagtat ttacctagca tgtcaatgga |
| 37081 | tgataacaat tatctgcaaa tatttctgag tgttttaatt tgggtttccc tagaagtaga |
| 37141 | ctttgagaca gggaattgag gcaaggagtc tatctgggag gcaatcccag ggcactttgg |
| 37201 | caggaaaatg gtaaaatgag acaggatggg agaggaccca ataaatggta tgttatcaag |
| 37261 | cgagctatcg ttatgggtat ctggagttta attctacagg ggactctatg aaacagtgta |
| 37321 | gaacacacaa ctcagactta tcctgaccaa gatgcaaggg agcbjggtat ttatacaaaa |
| 37381 | agtcttgtta aactttggct tagggctgct ctggggagca taattacttg tctcctgtct |
| 37441 | gctgtaagtg ggcagcatgg gttctggcag taagagcaaa aactcaggga ataaagtgga |
| 37501 | gatgataaca gttgaaagtt ggactggtat ctactgaaat actgagacca tggacagctc |
| 37561 | gcaggctatt aacaaggtct tctaaactac tcatatatgc atggtaatct gcatgcattt |
| 37621 | ctgaatgtat acatctatac gaattggaac caacagatga aagtaactac atgaaaactg |
| 37681 | tgaaatatag aaattactta cctgtaatag gacagataga atatacagac aatgctctta |
| 37741 | agttcatggg tttctatttg aatgtatatg ttggtgcaga ccctgtgaca atctgtattt |
| 37801 | tcaggaattg taggtatatt tgagaaagtt atatttttat gtaatatata acagttctct |
| 37861 | ttaggactta tcagtggata tcctaagaaa cttttaaata ttttcctatg tttattcatc |
| 37921 | ccacttcaca ctggtataga tagatagttt tttgataact caaatctacc tgtggtaagc |
| 37981 | agaataatgg cccccaaaga tgtccacaac ctactccctg gaacctgtgg acttgttacc |
| 38041 | tacatggcag aaggggtttt gcaggtgtgg ttaaattaag gatcttgaga tggaaagatt |
| 38101 | atgatcctgg attatctaca tggttccagt gtctttacag gctctttata agtgaaagag |
| 38161 | agaggatgtg gagtcagatt cagaatggtg tgatgtgaaa aagactcatc tggtcattga |
| 38221 | tggctttgaa tgtggaagga agccatgagc caaggagagc atggagcttc tagaagctag |
| 38281 | aaaagggaag aaagtgtatt cttctccaga gccccttaca ggctttgcca gacaccttga |
| 38341 | tcgtagccca gtgaaaacca ttttggacat ttcacctgca aagctgtaaa aaaaaatgca |
| 38401 | tttctaatgt tttaagcaac taaacttgta gtactttaca ccagcagcaa tgagaaacta |
| 38461 | atgagctacc taataaacac agaggtaaag tcacctcaag taaaaaaaaa aaaaacaagt |
| 38521 | taagacctat gttttaaagg tcatagcagt atttccactg tccgtatgtc actgcagtga |
| 38581 | taaatgctgt gttttgacca ttgaaagaat tojaaattcg agtaagcaaa actaagttgg |
| 38641 | aattctgcct aattactctc tatttaacct cagataactt ttaatttctc tttgctttat |
| 38701 | gttcatcatc tggaatatgg ttacagtaat aatattctga cttccctcat gagttcattg |
| 38761 | taagtattaa tttgaataac ctaggcgaaa ggacgttgta gtctgcaaca tagtacatgc |
| 38821 | aattttattt ggctttgtta gcaaataata gtgctaaaag aaatcagata tccaaaagac |
| 38881 | ataaattaaa ccacataatc ctagtcaatt tgtagatttc tgagtatttc tgtatcaaac |
| 38941 | tggcaagtat atgctatatt tatgatgagt aagtcataac agttaaaaga ttgactatta |
| 39001 | attgagagta aaaattgtcc ttgttattgt cttatgcatt ttaatttgca ttttctgtgc |
| 39061 | cttaaataga aatattttaa aacaattcat gtatgcagga ataaaagcac tttagtggac |
| 39121 | tattaaatgg taaacttctc cacatcattc atgagggagg agttataaaa ctgttctaac |
| 39181 | tctcaatttc ctaaaacttt ggtaaaataa tattctatct catattctcc cttctgtatg |
| 39241 | tctttatgtt tgcaaagatt ctttggggca cagaaataaa caaatcatcc ctatgaaagg |
| 39301 | gtcatcgtag ctgccagtga ccaaaagagc tgcctgctga gcagtttcat actgttactc |
| 39361 | cagctgccat ggactcatgc gtgaggaatt cacacagcta atcaattcca taaggtgcag |
| 39421 | ttgctggctt ctctcttctt aagcctgtac ataaggaatt ggcacttgag tgtttcatcc |
| 39481 | tgtggactct acatcattcc ttcacaccct ctgccatttc ctggccctcc ccaaaataga |
| 39541 | cccaaagcaa aacaataata aacaatttgc tgtttgattt ttagtcagca ctaccattca |
| 39601 | ccagccctta agaatgccac agcagctgcc tgtcactgac bitttcagca ggatcaggct |
| 39661 | agaggtagga gaggcggggc aaaatttctc ctccttgtag gttttagtta attgctgtca |
| 39721 | atgacaacta gcagttgtgc acctgtttcc atgcatttag tttctaccct ccatcaataa |
| 39781 | attctaacaa ttatttattg aacatattct atagttttgg tccttaaaat aacatctgat |
| 39841 | tataggtact gttgttatca aatgaggaag cagacttcac aaatagcaac tgggccacaa |
| 39901 | atcttgctac caagtgtcct agccagtggt cttggaagtc taggctcttt ccctatagcc |
| 39961 | cccctgattt tattagccaa gttctaattc taacatggga aagtcctatt tcttagttat |
| 40021 | gtgtgatgta acttagattt gtgtgtaagt tattatttct tagttttgtg tgatataact |
| 40081 | tacattatca tgtacatgtg cacatttaca tcttacatgg gaaattttaa tcagaggatg |
| 40141 | tcttcatctt tgcgtcacta ctgaattgac taaagactca ctcaaagaca tttccgtttt |
| 40201 | aatagtgaag agaaggaagt gattctcttt gcatcttatc ccttcatcct acaggcattg |
| 40261 | tgctcctact gaacactgaa gagtagtttt gttggcagta accttagaac gtttggagtc |
| 40321 | aaaagttgtt gtctctatta cactcagatt gtagaaagtc agcaggccat tcggagtgcc |
| 40381 | aatatgagct atgtaaaagt catctcaaga ctggaggaag agtgactctt gaggccttta |
| 40441 | ttttccatat aaattgtgcc ctctgtttcc tagcaccttt caggatccgg ggcagcctgt |
| 40501 | ctgccatttt ccacttgttt agggctttaa aatcgtaaag aacttcatta actccatgaa |
| 40561 | ggccttcaat ttaatattga ggatactgga gtatttatca cagaaaagat acagctcaaa |
| 40621 | aattttaacg caatttcatg gaaaattaaa aaaataacta ttacattttg gtaagacttg |
| 40681 | tatactgaat ttttcagaat gtaagctaaa ttgggtttaa tcttatattt tataaaaaca |
| 40741 | aagaaatatg aaatttatcc atttattttt tttttcttta tgacatattc caaatataca |
| 40801 | gaggaggaca gagacctaaa agcctcaggg acccatggtg gggctctatc aaattctttc |
| 40861 | attttgcctt atgtttccag atattgttat gagaaaaaaa cttacaggta aattgaagac |
| 40921 | ccccatataa gccttcagaa atctcattcc ccttcctcca ccaagttaac caatattctg |
| 40981 | aatttagtat ttatattttt atgctttttt tttacgttta cacatatcat tgatctatcc |
| 41041 | aactttttgt aaattatgtt gtgctgaaca tacattcttc aacatgttat tttctgtttt |
| 41101 | bitttatgtt ttattttagg gattaagcct tgttgatgcc tatagcttta atatatatgt |
| 41161 | agaaatctgt tgtatgaccc atgggttagc aattctctgg taaaggatat tccattttct |
| 41221 | tcaaacattt tgctgctgca attagtactg tagtgaacat tttgatgttt ccttataaaa |
| 41281 | agaatggtgg tctttttagt ttgtaggaat tctttgatca ttctattaat cctttgtcaa |
| 41341 | ttatgtggtt gaaatgcctt gaattttcaa atttatttgt atgaaaatac tgacagtagt |
| 41401 | cccttatgat ttttgccatc cattctataa agagctattc gcgtttcaat tctaaaattc |
| 41461 | tttgtaagtt ttctctttca ttcttggaag actgttbitt tactctttag tctcttcaaa |
| 41521 | gaattttgtt tggttttttg gctctctcta tttctgtgtt tatatttcac tattttatac |
| 41581 | tgttgctttg attaaatcct tccttttaga ttgtttaagt acattttcat tctttttcta |
| 41641 | acttcttgag ttgaattacc ttaaatttat tattctcagt cttatagttt ttaataaatg |
| 41701 | tatttcattt attaaataaa tgtatccatt tctcttttaa cttcttccca caagtttgga |
| 41761 | aaagtattcc ttttattgta aagttctggt tctctttctt ttttttcttt ttgtcctatt |
| 41821 | gggatttcct gttataaccc atgggctact gaagttttca aacgtataga aattttttgc |
| 41881 | agaaagtttt tgcagtatct attaattaac gatttctatt gtaacatcat ggtaaaaaaa |
| 41941 | cattggttct gtaagatacc aattctttga aattgtttgt gatcttttgg aacccagctg |
| 42001 | gtggtcagtt ttcataaata gtttttgtgt atctgaaaaa gatgtcaatc cagacaggat |
| 42061 | tttatatgta tacctatgag aagaaacttg ttaaatttat gttagatctt ttctatttta |
| 42121 | ctaaattcct gcttcccctg aagggtttag gtatgcaagt cctttagaaa tctaaaggta |
| 42181 | gtaatgttag gtttataatt gaaatggctt ctcagtggac tctacgtctt ttactgtatt |
| 42241 | gtgaaccctt tgatgcattg ttttacattt ttttcttact ggcattagta ttactacata |
| 42301 | tataaatttt tttcaagtta gtatctatat agtatatttt cttcagtctc tattttaaac |
| 42361 | tttcaaaaca aatatagttt tgttttaggt tattcttgta atcatcatgt agttttataa |
| 42421 | aaatctaatt tgattatcac taatatgtga gtttgataaa tccacatagt cataattact |
| 42481 | gatatgtcac aacacagtaa gggcbgtggt cttcatttat ctgaacaact gctttacatt |
| 42541 | tagtttcaga gatcggagta ataatgaacc tttctgcatg tacccagtgt tatgactcct |
| 42601 | gtaaggatta atttaaaaat gttcaatatt tattttcctt ttggattttg ctgaaaattt |
| 42661 | aattttagaa ataaaaaaaa tctctagttc tttcaaattt tccatgaatt gaagattgtt |
| 42721 | taccgatcta tttttttaat actgcatttt ggcataattt tttaataaat gtttacactg |
| 42781 | taattttcag taattcagtg taaagctaac aggttttttt caaagatgaa gagacacaat |
| 42841 | atgttataga atatagtaca tggtgggaca gttaagtagg ggttctggag tttatttttg |
| 42901 | cttctgctac ttaactatgt tattacaaag aaaaaaatca tgtaagagac tccgccaaat |
| 42961 | tctcttctgt ataacaagag ggagtgacat actatctcaa tttcagtttt catatttaat |
| 43021 | gactcacaat tggatttttg gtatatattt gaccactttc taagatttta ttttttatgt |
| 43081 | tcttgaaaat tttatattct ataaatattt ttgtatacat atgtacctca cattcaaggt |
| 43141 | aagaaattct taagtaattg aactttgtgg ctataattaa atatatacac taatagatga |
| 43201 | cagaataaag aaaatatttt tattctgaga gcctaatttt aggtaatgaa aatcatttta |
| 43261 | tgggtaaata aagtacacat tttatagtgt gctaaaaaat acacaaaatt tgacatttaa |
| 43321 | aacaataaaa aatattaaat aacttggaat gaaaggagca tatcgaagta tttgtgaata |
| 43381 | aataatctca aattgatttt ttccaacact ataacatctc ttttctgttt aaaagaagtt |
| 43441 | taatagttgg ttcaatcttt tctttgagtt tgttttttat attttccaag cttttaattg |
| 43501 | tcagtggagg gagaggactt gagtgttttt aaggtttcca tcaacatcca ttctcctgta |
| 43561 | ttcattgtta ggccaaaagg actcaacatc tttgagtctt ccctatttga gaccaagtct |
| 43621 | atactcagct tctaatttca gctctagctt ccattcactc tcagtctttg ttagcattat |
| 43681 | ctaagtttag gttgagatta ttgcattatt gacttgcatt ataaacttct tctttcaaga |
| 43741 | ataatatgac cttttaatct tgttatatat gtttacccat catttacata aatttttatt |
| 43801 | ttatattcca tatggtttta ttccaacagt cttttgtagt taaatatttt atactcattc |
| 43861 | atcataaatc ttcaagtaat ttttagaaga attttgtaaa agtatatgac ttttttaaat |
| 43921 | tttgtgggta gactatatca ataaaatatt taaatatatt cagaaacttc ttttaaagtt |
| 43981 | catatcactt tactttggta aagagtttta gcaaaagctt ataattaaaa tatgcgacag |
| 44041 | tgctcacaga gcatttctga ttactatcag aaataggggt ttattctgga aagttgtttt |
| 44101 | cctgaaagtc ttaattgtaa aaagtgcagt ttaataccta ttatattctt atgtgtatat |
| 44161 | taatgccaaa ttaagcaatc ttcctccctt tctttcttcc ttctttcctt tcctctttcc |
| 44221 | ttcttttctt cgtttctata tttatgctgt atacgtacta cttgaaatat ccagacacta |
| 44281 | ctatttgttt aattcacaag ccatatctgg tgatatggat attattgttc ttgtttcata |
| 44341 | gttgaagaaa ctgaaacttt aatgaggttg gataagagcc acaagtatag cagattttat |
| 44401 | agtgtataac cctgcaaagc tcaaatttgg attgatatct ctgtttattc tagaaccctc |
| 44461 | ctctgtgtca ttctatgtca gtttgctttg ttgtttatta tggtaaagta atcattcttc |
| 44521 | acttcaacag ttatctgtga gttgattcta aaacatagaa aaattttgtt ttaaaataaa |
| 44581 | ttgtatgtat gtoitcacct aataatgggc ctatgtgggg tccacacaaa accagtttgc |
| 44641 | tgcagtcttg gcatagtgta aaattcccaa agtttttata tacatattga atgcctcaag |
| 44701 | gtatatttta aaagcccttg ctaatcccaa aggaattgtt ctaaaaattt gtttaaatga |
| 44761 | aatttttata tattttaata tttaaatttt aaataatatt tttaaaaatc ttaggctgaa |
| 44821 | ctttcagttt gtaattagca aagtaattat tatttgcccc aagccagctt cctcctattt |
| 44881 | cctgaccctc atttgtcttc cctccttata agatgcttaa tgaaagagaa cttgattttt |
| 44941 | gttcatttgt ttttgagaca gggtctggct ctgttgccca ggatagagtg cagtggcaca |
| 45001 | attgtagctc actgcagcct tgaacctggg ctcaagggat cctcctgcct cagtgtcctg |
| 45061 | agtagcbjgg actacaagct catggctaat gagcctggct aatttttaaa ttttttgtag |
| 45121 | agatgggggt ctcgctgtat tgoccaggat ggtottgaac toctaggctc aagcagtcct |
| 45181 | ccagcttggc ctcccaaagt actgggattg caggtgtgag gaccacgccc agccttgaaa |
| 45241 | cttgattgtt atttacatgg tgcacttaag aagcctaatc ttaccttctg acccagggtt |
| 45301 | tgcagtcaca gtccttagag tttttgaata aagactgtgc tatttctttt ttttaaaagg |
| 45361 | gatttgtttt tatctaattt atttctgcct ttatgtttac tcattattaa ttattcaaaa |
| 45421 | taagattggg atcatcattt atgtatgaat aactcaaatt agtttattgt aatacatagt |
| 45481 | cctggtgaag aagaacatat tcagttcatg ccttcaattt gcatttatct tgattagtgt |
| 45541 | ttaagtgcat ctcatttccc tatgcttctg ttttcatagc ttatataact acactgttag |
| 45601 | attttatgca tgatgtaaca ggatacaatc ccatgatata tttccatgat gtcaaagctt |
| 45661 | tgaattatgt aaataggaaa catgaagcaa aagcatacta cttattcatt atgcattgct |
| 45721 | atgojgcaga cgcacagtca agtgatgcta tttaatctcc ctatctgcat attcttaaag |
| 45781 | tgcatatctc tgtgatatcg aagcactcaa gcaatgagta aatttctgca tctggttaat |
| 45841 | aaattcagca aacaggagtt catcaacatc tggcatctgc cttattttac tggctttata |
| 45901 | tgaataactg atggatggcg acctttgata aatttagtgg ttgcttggaa ttttagtagg |
| 45961 | ggtttgatat tgtttgtgtg ctattgtgaa tttaatatgg caatcaactt tctcttggtt |
| 46021 | gctttactca tactagaaac cacagcatca accaatcaaa aggcbgttta gcatttggtg |
| 46081 | ttatcacata taccctaatt tgcacaactt tccaaaatgt aagtaccaag agagaagaca |
| 46141 | catcaataaa atataggaat tataaggaag aggaagaggt ttttaaaagt atattattat |
| 46201 | tcagcaaata atggaaactg gtgctcacaa actactaaat taagagggct tttttccttt |
| 46261 | aaaaattaat gcaatgatag tgcagaacac caaataaaaa ctgcatagcc aaggctctgg |
| 46321 | aaggttgctg gtggctcctg gacatcagtg ggatttcaca tctttctctc tgacatatca |
| 46381 | tttgttcatt tccagagaat gcccagctct gtgttttctt aaaaataagt ttagaattct |
| 46441 | cataaaggtg gacattattg gcctagcatg agttaatttt ctctacccct ggacctggac |
| 46501 | caatcatata tataagcaga gagcagaaag gtagcacaga ctgaggcaag gtgaggataa |
| 46561 | ggtatttttt gbitgtcaca gagacacctt gcttgtctca tttttgaaaa tgatgaaaac |
| 46621 | aaatggtgac taataaatag aaaatgctct gtggtattat cttctagtac taatgttttc |
| 46681 | ttcactgtcc ctggcctggt atctttcttg gcatacctca caaattactt gacttctgtt |
| 46741 | ttatgttgac ttcactcctt tacattacat tattgggaag ccctaggtct tagaaaacta |
| 46801 | tttcttaaac tgaattaaaa ttttgccctt gtacactggt actggctctg tcctctcagt |
| 46861 | aatagaaaag aagtcttcca tatgtccaca gccattattt gcaaaaagat atctctttct |
| 46921 | tcaggcttat gtttcccatg ctacatctct cttgttctct gaaccacact ttatacagcc |
| 46981 | tgactttcca tattctcact gttgctgtca tccccatctg atcattcccc tctgtcttaa |
| 47041 | aatgtgacaa ttacaactgg acataatact ccatctgtga tcttctcagg acagacccaa |
| 47101 | gcaggtccca gtatagtgtt agcaggacat cacatttttg gcttcagatg aacctgtaaa |
| 47161 | tacctaaagt acctggactt ttcccatgaa ttgttggtag gccaggatgt gtgccccatt |
| 47221 | agttggggac actttctagt gacagttcct ggaactctat ctggctattt ctctagtcag |
| 47281 | gcagtgaagg cagataaatc ctoggttcct ggcaggttca ggtggaacac gcagcacagt |
| 47341 | gtgcgctgtt gaatgagtgt tcccgagatc taatcacatg gaatgcctga ttgtcaaatg |
| 47401 | atgaacaaat aattcaggag atggacctgg gagttgaaaa tttttttaac aaaaaagaaa |
| 47461 | ttacatatat gcatttttaa caaaagtttt ataatcattg atatagtgat ggtagcacca |
| 47521 | gtagatattc aggcaagtaa ttatcaactg gatgacttat aaaggaattg ataaagcctc |
| 47581 | ccaagggatt caagaaaagg gtaaagcttg gaagtcccta aggataagtg gctgagatgt |
| 47641 | ttgattcagg acttcctgtc cttgaaacct tggtcagtta ctagcacgta ggacagtctc |
| 47701 | tattgtggac cagtaaaaag ctggttgtct ggagaattca gacagaaaag gtaaggctgg |
| 47761 | gacccagtta tcaaggctgc actacaacta gggcttgtaa aagttagggg attttggaat |
| 47821 | tagcgtagaa ataatgtaat atggtgtaag taacacaggc tttgtaatta gtgcaaaaat |
| 47881 | cataagcata tgggcttgag tcagtcttct ctttcctact tactggctgc ataccttttg |
| 47941 | tcagctattt aacctctctc taagcctcag cttcttcatt tataaaacaa attaatatta |
| 48001 | tctacactga agtattatag gagagatgat aatgtatttt ttaaaaacta gcacagaccc |
| 48061 | tggtcaacaa taataaacat actaataatt gttactatta taataaacgt gttgatatct |
| 48121 | ttttcttcat caatgacttt ataaaaatat tgggatggag atgccaaaat ctcctctgct |
| 48181 | aaatgccatc tttcatccta aggctataca ggaacaggcc ttgcctactg aactttgtag |
| 48241 | ctataggcct actacattgc ctcccacttg aaccctoggt tataaacgga atggagagtt |
| 48301 | acttttccat tcagaaaaga accttgatat ttcagaagga aaagttagcc ctggacactt |
| 48361 | gagcatttct aagaaaatag gttttttttt tctttttaaa ttgtgtacct gctgccctga |
| 48421 | attctctaga tgttctgagc actctgtata ttcttactca tagcttagta ataaattatg |
| 48481 | tttataaatt ggagactggt attgtataat ttagttcatt gaaataattt gatctggtga |
| 48541 | cttcatagcc agacagagtc aatggattca tataaatgag aatccagggt taatcaccat |
| 48601 | caaacatttt caacataaag tgacattttt ttccttagaa tgggattttt actacattca |
| 48661 | aattttacta atgctgtaaa catgaaaatt ttgagtcagg taatgaattt gagaatggat |
| 48721 | agctaatctt taaaaatcta gtaacaaatg tttctgggaa ttgtggctat tgttcccttt |
| 48781 | tggaatgatg accaacattt ttggaaatga aaatattgat aaatttgtgt ggacttaaat |
| 48841 | atggagtcca cacaagattg gggtcatagg acagaaacaa tatttgtttc acatttacat |
| 48901 | tgctgaggta ttatgaagag gttagaaagg tgatttttat ttagcttgca gaataaatat |
| 48961 | tttaaaatca cagaataaca tatactatta aatgcctaca tacatttata tccatatgaa |
| 49021 | taaaacagta gaagctgaaa tataaaataa catgccactg ctgctggaga gatttaagcc |
| 49081 | aattatctgc tatcctggag catcagacat atatatctat atctatctat aatattatat |
| 49141 | atttcataat ttatatattt atatatcggt ataatatatt gttttataca gattatatta |
| 49201 | ttatatgctg tttttcacca abittgttta catatattat acattattta tatccggtga |
| 49261 | ctacataatt gtgcatggta catcccgtct ctagtcagtt gtcatgacaa gagttttaat |
| 49321 | catttatgct tactttatga ttctattgta caatttttat tggacattat ttcagttttt |
| 49381 | attaattaac agggcatatc aaatacctcc atacacactt tattacagat ttttttgtcc |
| 49441 | caaatatttt tagcattttt ttaaatatga aaatagatag tttggaaaca agcttctatc |
| 49501 | atctactatt tcttcagtta tttgaatgca gatggcctat cacaggacac aagaagttga |
| 49561 | gaatgtgcta ggagaattgc cagcactgct caatacaggt gtttgcccag gtctaccttt |
| 49621 | tgactotctc acttgatctg ttottgtgct tctcactttc ctgggcagcc agtcccttac |
| 49681 | tgagtatttc tggccttcag tatctgcttc ttccggttcc tttgatgcag cacccacttg |
| 49741 | ggctcgcttc tgtagttcgc taaactcagt tgcttatcat tgtaatattt ccgtaatatc |
| 49801 | agaatgacta ctgtctcaac ttaggagaca tccacttgtc ttctccagca cctgactgag |
| 49861 | ttcttgccat ataaattttt gttgaataaa ttcaatgttt ggcttttcac atcatcataa |
| 49921 | acaagactta caccaacaat catgggggaa tttgaataaa attaagatta ggtctgactt |
| 49981 | ttgcaatttt acaacttaca agttagtgtt aagaaaatgt ataaagatgg tgatatgcca |
| 50041 | ttttgaaaca tattaagcat tttcatcttt agaacagcct tcaagagagt tattatgaaa |
| 50101 | cacatttaag cttaagaaag ctgagaatca gaatgataat taataattat ttgagggtgg |
| 50161 | atgaaaaagt aaagaacatt tacacagttt tagtgagaat gtaaattagt tcaatcctaa |
| 50221 | ggaaaacaat atgaaaattt ctcaaagaac taaaaataga actacagttt gacccagcaa |
| 50281 | ccccattact ggtatgoggg tggtactata taagaggaaa agaaacatcc tgtcaaacag |
| 50341 | acatctgcac tcatgtttat cgcagcacta tttttaatag caaagtcatg gaatcagcct |
| 50401 | aagttcctat cagojgggga ctggatacag aaaatgtggt acatacacac catggaatac |
| 50461 | tatgcgtccg taaaaggatg aaatgatgtg ctttgcagca acatggactc tgctggaggc |
| 50521 | cgttttccta agtgaattaa cacagaaaca gaaaatcaaa tacttcatgt tctcacttat |
| 50581 | acgggagcta aacagtggtc atgtaagcac ataaagatgg aaacagtaga cactggggac |
| 50641 | tccaaaatgg ggggaaagag ggaggagaac aagggttgta gaagccaaat tgaagcctga |
| 50701 | aacaatacac ctttgtaacc cacctgcaca tgtggcccct gaatctaaaa taaatcaaac |
| 50761 | aaaaaattaa caagcaaaca aaaaacagag gaactagggt ttgaattaat atttctgatc |
| 50821 | tgcatatcgc tattttcctc ttaaattatg tgcttaaata catgaagaag gaggaggaga |
| 50881 | aaaaaacaac ttaattagga gacttacttt aataatgtat catttataac ttttcttcca |
| 50941 | aaatctggtt acatgtcaag aaactgtata atgtgaatct ctctagttca cctttccttt |
| 51001 | cctttatgta gatcttggtt gcaattcaga ttttcttttt tctaatgaac agtacaatca |
| 51061 | gtaacagttg caccaaacat ttcaatttgc aatatacatg taatggtttt tcaagtgaag |
| 51121 | gttacatttt atcttttttt attatccata gaataatgtg ttttaggatg aaagagacac |
| 51181 | tgtgtgtgtg tactccgttt aaaattaaga tctgacggtc tgagacatca catacaaagc |
| 51241 | ataattcagt agctatctga cagtttccca attgctatga cactaaaaat aaaccaaacc |
| 51301 | agataaatca accccctaag tggactctct ggcctgaaat gttojggttt taatgtgcct |
| 51361 | gtggaatgtt ccaatataat tttcatcaat gttgattgtc cagctcacac agccctgggc |
| 51421 | actagagtga ttgacataa ccccgtcatt attccaacaa ttaaatcagc aggaattagc |
| 51481 | acaaacattt ttttcctgtt ccgtacacta aaaatgtttc catgctgcaa tgttaggatt |
| 51541 | taaatgtaac aaacataatc ttccctgtgt tgtataactt tccgatctac taagaaagcc |
| 51601 | taccaaaatg gagcatttgg tttaaaaata aatacctgga ctcttccatg tggcaacaaa |
| 51661 | caatacataa gagatattgg acaatgaaca attaattaca ttgataaaaa taattgatga |
| 51721 | attaagaatg taaatctaaa gatactttat attcctcttt ttggtttaac tttcaaatcc |
| 51781 | agaaagctct taacctggtt aactaatcga tgataacgtt atacaacaaa cttttgttga |
| 51841 | gtacttgcta ttcattcctt gaacgttatt tattgtaata aacgtgttaa ttgaggttct |
| 51901 | acatatataa aactgtttaa ggtgcaatga aacaaaaatc acctgaactt cggacaaatg |
| 51961 | tgatttttgt ctttgcttag gacgtttttg gaatatttac ttttgaaaat gtctccatga |
| 52021 | cctgtggcag tgttttcttc tgaatagtat aaatgacgat ggcaaatcta aaataagtta |
| 52081 | tttggagcca catctagaaa ataatgtgag tattccagtt attagggaag gctagatttg |
| 52141 | atcaaatata tatatagtta tatgtattct ctctctatat atagaatata tagttacata |
| 52201 | tgttctatat atagttatat atactctcta tatatagaat atatagttat atatactctc |
| 52261 | tatatataga atatatagtt atatatactc tatatactct atatagaata tatatataac |
| 52321 | tatatataga atatatataa ctatatataa atatatagtt atatataact atatatagaa |
| 52381 | tatatataac tatatataaa tatatagtta tatatattta tttataaata tagttatata |
| 52441 | tactctatat agatatatac tctatataga gaatatatag ttatatatat tctatatata |
| 52501 | tattctatat atagttatat attctatata tagatatata ttctatatat agaatatata |
| 52561 | gttatatata gttatatata ttctatatat ataacttcta tatatagtta tatattctat |
| 52621 | atatagaata tatatataga atatatgtat agaatatata gaatatataa tatatagtta |
| 52681 | tatatattct atatatcgaa tagttatata tattcgatat atcgaatata tagttatata |
| 52741 | tattcgatat atcgaatata tagttatata tattcgatat atcgaatata tagttatata |
| 52801 | tattctatag ccataatgcc tattagcctg gcatttagac ttgcaagtgt caacttatta |
| 52861 | cttaccttgt tttattttat ttctttaatg atctcaaaac cttcctctct cgatttcaat |
| 52921 | ctgtggtttg ttcccaccat ttgccgaggt ctagcatctt attctttgat tttctttttt |
| 52981 | cttttcttca acttttaagt tcaggggttc atgtgcagga tgtgtaggtt tgttacgtag |
| 53041 | gtaaatgtgt gccatggtgg tttgctgcac agatcatcct atcacatagg tattaaaccc |
| 53101 | agcatccatt aactattctt ccgatgcgtt ccctaccctc atacgctccc cccacaacag |
| 53161 | gccccagtgt gtgttgttcc ctcccatgtg tgcatgtgtt ctcatcattc agctcccact |
| 53221 | tataagtgag aacatgcagt gtttgctttt ctgctcctgc attagtttgc tcaggatgat |
| 53281 | ggcttccagc tccatccatg tccctacaaa ggacatgatc tcgttccttt ttatggctac |
| 53341 | atagttttcc atagtgtata tgtaccacat tctctttatc cagtctatca ttgatgggca |
| 53401 | atgattttgt aatataatga tttatattcc tttgggtata tacccagtaa tgggattgca |
| 53461 | gggtcaagtg gtatttctgc ctctaggtat ttggggaatc accacactgt ctttcagaat |
| 53521 | ggttaaacta attaatactc ccacaaacag tgtaaagggt tcctttttct ccacaacacc |
| 53581 | accagcatgt gttgtttttt gacttcttaa taatagccat tctgattgga ataagatggt |
| 53641 | atctcattgt ggttttgatt ttgcatttct ctaatgatca gtgatattga gcttttattt |
| 53701 | catatgtttg tcagctgcat gtatgtcttc ttttgagagg cagaaatacc attcgaccct |
| 53761 | gcaatcccat tactgggtat atacccaaag gaatataaat cattatatta taaaatcatt |
| 53821 | gcccatcaat gatagactgg ataaagagtc tctgttcatg ttctttgccc actttttaat |
| 53881 | gggatttttt tttcttgtaa atttaagttc cttgtagact ctggatatta gacttttgtc |
| 53941 | agatggatag attgcagaag ttttctccca ttctgtaggt tgtctgttaa ctccgatgat |
| 54001 | agtttctttt gctgtgaaga agctctttag tttaattaga tcccattcgt caatctttgc |
| 54061 | ttttgttgca atcgcttttg gcgtcttcgt catgaaatct ttgcctatgc ctgtgtcctc |
| 54121 | aatggtattg cctagattat cttctaggat ttttgtagtt ttgagtttta catttaaatc |
| 54181 | tttaatccat cttgagttaa tttttgcata tgatgtaagg aaagggtcaa gtttcaattt |
| 54241 | tctgcatgtg gctagccagt tctcccagca ccatttatta aatagggagt cctttctcta |
| 54301 | ttgtttattt ttgtcaggtt tgtcaaaagt cagatggttg taggtgtgtg gctttattcc |
| 54361 | tgggttctct gttctgttcc attggtctat gtgtctcttc ttgtaccagt atcctgctgt |
| 54421 | tttggttact gttgacttgt agtatagttt gaaatcaggt agtgtgatgc ctccagcttt |
| 54481 | gtgctttttg cttaggattg tcttggctat ctgggctctt ttttgattcc atatgaattt |
| 54541 | tttaaaagtt tttctaatgc tgtgaagaat accaatggta gtttaatgga aatagcattg |
| 54601 | aatctatcaa ttactttggg cagtatggcc attttcatga tattgattct tcctatccat |
| 54661 | gagcatgaaa tgcttttcca tttgcttgtg tcctctctga attttttatc agtggtttgt |
| 54721 | acttctcctt gaagaggtct ttcacttccc ttgttagctg tattagcatc ttattctttc |
| 54781 | aagaggacag tttgttcagt ttgtttaaat tattatcacc atcacaacca ttaaaccttt |
| 54841 | attcagcaac tgaagaatgt accacaatat ctctcatttg caagacatat tctgttcatc |
| 54901 | ttctgctttc tgcttctgta gcttataaag atatataaat atattttaaa cccaatttgt |
| 54961 | aattatatat gatgggaatt gaaaacgtgg gtgattttca aataatcact aaggaataaa |
| 55021 | atatgctaaa aataaattgt gaagaattga tatgattttc taaggatggc tttactggag |
| 55081 | aaaagcagtt atcctacaat agttaatata taactatttt tatgattatt ctgttcagaa |
| 55141 | tctgaattta tattattatt tggggccttt tttaatcaag tgaagaaagg tatattttct |
| 55201 | tttcaaactt tttattttga acattcataa attacatgaa cactaaaaga cataaattat |
| 55261 | ctttcaggaa acattgaata aattctggat tcttctatat tttattgatt tgtaaaacat |
| 55321 | ctcaaattta acatagaaat gttaaaaaga gattatatta taacgtttgt tggaaaatat |
| 55381 | gctatattta taatatttat tctgtattta tatattataa atatattcta tatttatata |
| 55441 | ttataaacat attctatata tattataaac atattctata tttattaaca tttaacatta |
| 55501 | atgttaataa atatagaata tttttcaaca aactttataa tataattccc tccttcaatg |
| 55561 | aactaatttt tatggtggtt tacatttctt tttcaatgtt ggtttacatt tgacgttagg |
| 55621 | atgtttatta gttaatacaa taaagtgggt ggtcttttca ttaatattat cagtcaggtt |
| 55681 | tgtaaatagt gtatgttttg tataaccact taaaatttat atactgatat atattttgtt |
| 55741 | taagaatact taaaataaaa acattagtta tcatttgttg aactggaagg atcattactt |
| 55801 | aaaaatccat ccttaaaatt aaaatgactt atgcttcact gtgtagtgca ttgataaata |
| 55861 | tttagtctat agttttttct attgctatgt gtttagccaa gaattgtttt taatttggtg |
| 55921 | aacagtacct tattaggaat atgaaaattt ttgaagcagt catgaaatat ttaacaatta |
| 55981 | attatttaac aaacaattat gcaaaattaa ttttactaaa gaaatatttt taaatcactg |
| 56041 | caagaaatat tttcattcaa atgagtactt acaaccaaga aagagtcttt tattttttaa |
| 56101 | atgtgtataa atttaaactt caaaatactt aaatcactta atgcctcaga gaaaatatct |
| 56161 | taatacttat gaagtgttac gtgtactaag cattatgtta aattctataa agacatcttt |
| 56221 | ttaaatcatc acaagaaatt acaaggcagg tgcatctatt atatttttta tagtagaact |
| 56281 | aattgaggca cagtgagagg aaatgatgta ctcaagttcc acaggtgata agtggtacag |
| 56341 | ctgagtaaaa ttccaagtct aaaagctagt ctcttaacta ttatatatcg gcctatatgc |
| 56401 | ataggccgac aagtagttat ttaaagttat ataaatcaag agaaaacact acaaaattta |
| 56461 | cctataggat atttatacaa aatatgggca ttttattagg aaagotttct agaaatatgg |
| 56521 | gggaacttta agaaacagtg aaattcaaag ctatcattgt ccaaaagcat gtggtcttct |
| 56581 | gtttttgcac tagtgactta ggtgcaaatt acttccaaga tttttctcct aattgagaag |
| 56641 | tactttttag gtctagattc catggaggag gtgggtcttc gaggtggggc ttcaaggtgg |
| 56701 | agatagtgtc ttttttctag catgtaatga ggtaaatttg cttttgaatg aacaggtgca |
| 56761 | cctatttcaa ttaaggcaaa ttagtttcca aaggctttgc tatttaagat attatagaag |
| 56821 | gctatttaaa tgtgccaatt tacataaaat acattttgaa agattacagg aaacaatttt |
| 56881 | atataattca ctgaaacaat ttcacagtcc tctcaaatga tgattttgaa aatgacctaa |
| 56941 | atggcaggca cctctttgaa gcagctggca tgatgttatg tggtcccatg gccccttaca |
| 57001 | ttttcaggtc aatggtaaat tctccagagt ccaacttcaa ccctgcagta ttctgttcaa |
| 57061 | aattgcccct gttcagaagc ctgcatatgt aacctcttac attttgtgtt tcacaatttc |
| 57121 | cattgaactc ttcctacaca ccagaatggg caaaaatagg aatttaattt ctgggaagat |
| 57181 | ttcctctaag agcctctgtc caaaacatcc agtgctgaaa caagaaaagg tggtcctggc |
| 57241 | atatatccac tagtaatttt tttgtcttct tcttttcttt cctgttttat gtgtgaatag |
| 57301 | tgaaacttat cggttcaaag accgatgagt cagaatgctg tcattttaca tccaaacagt |
| 57361 | ggaaatttaa attgttaaaa taaaaataca caatcactaa cattaccctg atgaaataat |
| 57421 | gataagcaaa gtagtcttaa attacaggct ataagtgctg gataaagaac aatattttaa |
| 57481 | aaatatctaa agtcatataa tgaacagaag acagatttcc atttatacct gaaagactgg |
| 57541 | ttttcagaaa ttataataga acatggggat ttaaaaattg tatttggatc atttatttta |
| 57601 | cagttagaaa gtgatgtagg aaggagttcc cagaggagat gaaacagatt gaaaacagca |
| 57661 | aaattccatg acagaggtgg cttgaaatag accctttttt caaagcaata actggcctct |
| 57721 | tcatcatcta tagatagcat ttttggcaaa atcagaaaca tttgctttgc cagtcattga |
| 57781 | aggtaaaaag aaaaaaaaaa tggctgaatg cttttaaatt acatttattt aatttctgct |
| 57841 | ttcatacaaa ggcataaaat tatcagttta aattttaaaa aatattatta taaaattaca |
| 57901 | tgcttagaag tctgttgatt gttttcccac agccatttta taactgaaac cctcaatttt |
| 57961 | ggatatgaat gtataataaa cgcacatgtt cattctaaac attttctttt caaatacttt |
| 58021 | tacattcctt taggtttcct aaagaaatgt aaattccttc tgccacttag tttttgctat |
| 58081 | ttttagcagt ttcttaaagt ctgcaaattc ctttcactca gtttttgcac ttagttcata |
| 58141 | atgacttcac atttgacatt gattgtccac aaaaggggtt atttttagtt tcaaaaggtg |
| 58201 | aacgttattt gttttagaaa ttctcgcgta tatttcttag tctaaagata ggttttctaa |
| 58261 | cataaaaatg tgatagtgta gtctgtttgc tgagcacttg tagtggaaca aactcagtgc |
| 58321 | taaattcttg gtttttaata actaatttat ttattacagt aactgctaaa tatgcttcaa |
| 58381 | attataaact atttgccaaa attacagata ataatataac caaacaccat gtggatttca |
| 58441 | cctaaactag aagtaacttg gtgactttct tatttaatct tttatttatt gtacttggcc |
| 58501 | atacttattg tatgtttatg tataaaaaca taaagcaata gaagttttta cagttattat |
| 58561 | actcactgtc ttataaatgg agaaactgag acccagagaa ttttagtaac ttattcaaag |
| 58621 | ttacctagct ggtgactaga agcaaaacac aaataagacc acagattact agttttgtca |
| 58681 | agatcttcaa cataatttaa tattgcbgtc aactcagagg tctcagaaga taaggtctta |
| 58741 | ccatctgaaa acaacaaaaa agaaatttca taaaatcctg tttgtaccaa gcaatttatt |
| 58801 | tctagaatga aagcaaaatt atttttttaa agttctttag attgctgaga aatcaagagc |
| 58861 | attagggttg tgtctcccct ttaaatttac cttttagttt ctttgggttt aagtttttag |
| 58921 | atgaaatttt aaattctatt tagctctcag tttatgtgta tttaaaattt agatttagga |
| 58981 | tctattcttt ttaataaggg tgaaattaca tatggagaaa tttactgttt atagcgagtt |
| 59041 | ttgacaacta gagttgtata accaccatcc ccacagtcaa gatacatcac ttctcccctt |
| 59101 | cccaaacata ttccctggtg acactttgtg gtcatactca ttctccgcct ctagcctttt |
| 59161 | acaatgactt ctgttactcc ccctgtagat ttgcctatta aagaatgtta tataaaggaa |
| 59221 | tcacacatca tgtagcattt tgaatctggc ttgctttact tgttttaatg catttgagat |
| 59281 | ttgttcctat tgtggcagat atcagtagta gtcttctttt cattgttgga tattccatta |
| 59341 | catgaatgta caatcacatt ttatccattt gcccagctaa agaacatttg ggtgttttca |
| 59401 | gttttcatta ttatgagtaa accctccata aacatattgc atacaaattt ttatgtgaac |
| 59461 | ataagttttt gtttcaccta aacagatact atacaggact gaaattttag taagtatatg |
| 59521 | tttaactttg tgagaaactg cccaactgtt tttgcaaagt ggctgtacag atttacattt |
| 59581 | tcaacagcaa catgtgagag ttccagttgc tgcacgtcct tgtgagcact tagggttgta |
| 59641 | tttttaattt tatccactct aatgggtgtg gagtggtgtc ttattaaggt tttaataagc |
| 59701 | atttctctaa tttaatgcat tatattactt ctttttgttg gtttgtaaac tgcttatctt |
| 59761 | ctttggtgag tttgatcaaa tcatttgtcc abitttgtgt ttttgattat atttcagata |
| 59821 | caagtcttta ccagttatgt gctttgtaaa tgttttctca ctgtttatca tttgtgtgtt |
| 59881 | ttatggaaag cagaatattt cgattttctg gaaatataat ttgtcacttt aaaaattatg |
| 59941 | taaattgcta ttggtattaa gtgtaagaaa actttgcttc atctatgatc acaaatattt |
| 60001 | tcttctgaaa aaaaagctct ctgaagagtt tttttttttc aatgaatgtg ttttctttct |
| 60061 | tctctccata tgttatcttc tgaatagcta agcaatgttt acattattta ttcaggcctt |
| 60121 | tccatccact ttcacggatt ccactgaagg agaaattggg tttgaaatcc tcttttctca |
| 60181 | aaaactaatg agtcatgcat cttctcattg atattatctg gctcccctga aaacctctag |
| 60241 | tttggtccat ttttagtgat atctttctac tcaggttcct caaaccaatc tgtacctaag |
| 60301 | agacccccag attaaaattc aagttcattc ttttaacaaa ttaggtgcta attgctacaa |
| 60361 | atgcaagaaa acttcaggtg ctaatttgtt aaaagaatga acttgaactt tagtctgggg |
| 60421 | gtctcttaga tatagattga aaaggattga aaagaattat agtttctttc acttttgcca |
| 60481 | tcatacaata tgtattattt atatttcttc ttcgttaata ttcagttcac cttctttgtc |
| 60541 | catctttcta ttgaagcacc agtattcatg cagtgtttta agaatattag tccattttta |
| 60601 | tccattatgt atattgcaaa taatttcgta ctttattgtc ttttaatttg tttgcagtgt |
| 60661 | cctaagagta taaatataat agcttttcta cttttttcat tttttaatat tgcattttct |
| 60781 | ctattgtgaa tgttatgctt atgtttttct ccagctgatc tattgaggaa cagtgttttt |
| 60841 | ttaataaata taaatattgt tatagttatt tctcatttcg aagttttacg gtactaattt |
| 60901 | gtctgtctta aaacttcaaa taatacttaa ttgaaagtct ctgtctacca tcatcccttt |
| 60961 | cttaacagtt cggtgaatat cttttattat attgtgtaag gatgttgtat tgcagctcct |
| 61021 | cttgctaggc tgaacatgca gacctgttct ggaaatagat gtgatcagtt taggtcacaa |
| 61081 | cctgtcttga atcacagctg acttgtagtg gagagttcca ggaaccttcc aatcacacac |
| 61141 | aggtccctat tgctcctttt cttctagggc tattcaacaa gcagagacaa acaaaaactg |
| 61201 | atctgtcaca ttttactgca ggtaacagtg accacaaata cacctgtaca ctgttttttt |
| 61261 | tccaacatta ttgaggtgtg actgacaaat aaaaatggta tatatttaag gtatgtgatg |
| 61321 | cgatgttttg ctgtacatgt acattgtgaa atgattatca taatcatgtt aacatatcca |
| 61381 | tcacctcaca tattgttatt tttataatca cttttataaa ttttcccttc agtagtaacc |
| 61441 | ttttgagatt ctgaaacact tttgagtttt gaatgttgtg tcataagtga gtttttttgg |
| 61501 | caaatatttt ataaacatct aattgggaaa ctgtgagagg atgttttgta actttcattt |
| 61561 | aaactaagat ctcctctcca cctccaccct tcccatattc agtagatttt ctatggctgt |
| 61621 | atggtgtatc aggaatcatc ccatatactt cagaaagtaa tggaataata taaatatttt |
| 61681 | tctaacatag acctacagag attaagtgat atactcaaat cataccataa atggtagtga |
| 61741 | aagggtaaac tcaacattca cagccaactt cattatctaa tagggaacaa cacatttcat |
| 61801 | attaataatt gacttttatt tttaggaggc tctgttataa tgaaattaaa aaatgagatt |
| 61861 | agattatgtt tctcaatata tggtacaaaa atcacttaca tagaataact tcgattatta |
| 61921 | aaaatagaag tgaaaaatac ttttcagatt aaataagatt tcaattttaa ggcaaatatg |
| 61981 | ttcattttgt gctcaaaaat tagacaggaa aactataatc tgttaaaatg taggttcttg |
| 62041 | atccacccaa gaaaccatgg agaggtgggg gacagttacc tgcatttctg acagttagtt |
| 62101 | cattgactct tattcgacta aactttgaga accagtgtcc aaagtattta cttacatatt |
| 62161 | tatatttaaa agctgggata atcatgacaa tataaaataa acaattgatg ttgtatttta |
| 62221 | cttggcagat agataaagct atacaagttt cctttttcct aattctaaag cataattaga |
| 62281 | aaaaaattgt atttatttct tagatatggt aactactaaa atataatttg gaatgttcta |
| 62341 | cttaaatgag tatacttatg tatgcagtta gccgtcaata agatttagtg ttctctgaac |
| 62401 | tatttcattt ctatgaaggt ggtattaatc ttgatgataa aattttcttt taaatattga |
| 62461 | gagattctgc caaaatataa atcttactgt gacaatgttg ttgaaattcc tttcttcata |
| 62521 | tgattatttg ttctaaaata gctcccatga aagtaaaatt cctactctca agcatcctgc |
| 62581 | ttaagcatat tgtattgttg ctggtaacta aaaataaagc aaagcattag ggtggatttc |
| 62641 | agtgtaattt tatctgttta gtagagtgat acaaatgaat aaattttcaa acatacaaat |
| 62701 | tgaccaatta tttgaaagag ctatgaataa aataaataag ctaccttaaa attattttaa |
| 62761 | aattatatca caaaattttt ttcctaacaa caaaatatgt atttttaatt gttttggttc |
| 62821 | atacaaatta aaatacaaat ataattttac caaggaaagt gaagtaattt aggagtaatt |
| 62881 | aataatattt gtgttaggga acggagcata gatactatta aacctaaccg ttttatagtg |
| 62941 | catttgtttc taaatccctt aagctggtaa gtcattgatc ttgcattttt ctttgacagg |
| 63001 | cttatgcaag caaagatctg gaggagcagt tacggtctgt gtccagtgta gatgaactca |
| 63061 | tgactgtact ctacccagaa tattggaaaa tgtacaagtg tcagctaagg aaaggaggct |
| 63121 | ggcaacataa cagagaacag gccaacctca actcaaggac agaagagact ataaaatttg |
| 63181 | ctgcagcaca ttataataca gagatcttga aaagtaagta tgggaaataa aatgtatagt |
| 63241 | aagccttata tatcaaacca gtagaagttg ccagcctggt tctttaattt cagtgtttgt |
| 63301 | atcaccgaat acacctttag ggcggaaagc aaatagaaaa taaagaatta cttcaaaata |
| 63361 | caacatttta tgatttcact ttgagtatta agatgacttc ataaaataca ggatagatag |
| 63421 | gtccatgcat aaacaacaca catttatttt ttcaggtgat agccattgga aaatttttaa |
| 63481 | aacagatggc tatattttac atactatatc tgtttaataa cttaaacatt ctttatctta |
| 63541 | tcaaataatt ataccttaat ttcctatctg atttggattg agaaatgctt catttgaaat |
| 63601 | caccttttca gatgtcactt gttgctttgc tgcttcacag ataactggct cagagcggga |
| 63661 | cttaagctga tgaggtatct agcataaagc ttcacaaaaa atgatcatgt tgcataaaat |
| 63721 | gtcatagcat caattggtgg ggtatgactg ggcacagagg ttcatgtctg taatccgaga |
| 63781 | ccattgggag gccaaagtgg gaggattgct tgaagccaga gtcagagacc agcctgaaca |
| 63841 | acacagcaag acctcatctc tattaaaaaa aattaaaaag tggtggagta atttaaaaac |
| 63901 | atatttgcct tcagttggta gctcttaatc gctataaaag tttgatattg gaaagtattt |
| 63961 | tgagaacaga ggcaaacaaa atggcttcat ggttgtataa ccaatagttt atgtcctttt |
| 64021 | ccaaaaattc tattttaggg gaaatatggg ataagtaaac tagtatactt aggaagtaca |
| 64081 | ttatttgtaa tgcagaattt aaaaagtcaa cagtattata ggtaagctac taactcatca |
| 64141 | gaaacaaaat tccagaggag agttaaaagg gataggaaat attgactttg ctgaagaaag |
| 64201 | ttcagaatga gtcccagttg gtgaaaaata gccttgtatt ttatgtagct gcagccacga |
| 64261 | cattactcaa ggttgccaaa tagtccgcct gaaaaggacg tttgacttga atctaaaacc |
| 64321 | atagcbgtct tctcatatgc aactcagttt taaagaaaaa taaaattata tttatatttg |
| 64381 | cattgagagc acaaaaatgg cccatactat agagaatgaa catgactctc tctgcacatc |
| 64441 | ttataaacat tcatatatta aattaccatt ttcctaagaa agaaaaacca aacattagtg |
| 64501 | ttgtgggata ttggtgtact tttaataaag cataatgcta atttttctta ttgcctagct |
| 64561 | atagaaatga gtttaagaaa tatccttagc ttgtcttttc aatgttatat cattctcatt |
| 64621 | cacaagtcaa tttaggatcc catcagctgt ctctttagtt atatattgaa cttaaatgtt |
| 64681 | aaaatctgaa atgaatgtga gtgatttgca gctgcbgtgg gcttttttta tcttggtggt |
| 64741 | ttccgtaaaa cttactgatt tccctatgac ttgacaggta ttgataatga gtggagaaag |
| 64801 | actcaatgca tgccacggga ggtgtgtata gatgtgggga aggagtttgg agtcgcgaca |
| 64861 | aacaccttct ttaaacctcc atgtgtgtcc gtctacagat gtgggggttg ctgcaatagt |
| 64921 | gaggggctgc agtgcatgaa caccagcacg agctacctca gcaagacggt gggtattgcc |
| 64981 | cattcctgct acctgcgaga gcccccttaa tcagaagctt taactttggg gatgatgtgt |
| 65041 | ttaaacttct ggttgcttta aactaacttg gttcaactca gggtctcata ttttctttag |
| 65101 | gggaatgaag tcagtttttc agtgttttgt gtgtttgaca acacagtgtc acaaagaaag |
| 65161 | taattgatgc tttattactt tgcaaactct tcatatagtg gagtcaaagc ctcatgcaga |
| 65221 | aaacaataaa tatacgtatg tatgtgtgta catgtacgtg tgtatgtgtg tgtgttgatc |
| 65281 | ttcaagaata aacatgttca tttggcaata aaatactttt aaatgggtga gttttcagat |
| 65341 | ggtggagata acagtgcaaa cagtattcaa agtgtaaaat taaatgcgtg tgttctgtga |
| 65401 | aacagtggta tagtattgaa ataagccatc tcactgaaga aatttattgt cttcctgtcg |
| 65461 | aaagcaaagg aaataactct gacactaaat ctcagatgtt ttgaataaac tgggaagttt |
| 65521 | atctcattaa atggtaagct tctgataacc aggaaatgtc tcttaaggtt ggctttggat |
| 65581 | cagggatttt cagaccagac acataaaccc gotttgtggg cottacgtgg tagaggaggc |
| 65641 | tggcbgtgga acacgcgtat gtgctggcga taaccatgaa agtgttgttt gaaattgtgt |
| 65701 | gcacctctgg cctctgaaca gaaatgtttg gagaaatcca gtcccgtggg ctggactgaa |
| 65761 | gcaaacttct cccgaaagac aaaactgtgg ttgtcctaat gacctttcta agctattttt |
| 65821 | ggagttagac tcacacacgt aaatctggct aaattcagaa ctgttctttg acctggagaa |
| 65881 | tgaaaaatga aattgaaaga tgtggtgtta gatttgattt gtatgatgtg gtatgacaga |
| 65941 | aaattcacat tttaatttta tgcaaacttt agctgatcta catggttttc agtaataaaa |
| 66001 | cctactctta tttcaatata gtattaatag aaatcagagt taagattact atctcaattc |
| 66061 | catgaactac attttttcag ctagctgaat atttccaaaa tttttactgt tacgatcatt |
| 66121 | tggcctctga gtttggagac attgtcttat tatacaaccc aaattaattg ctttcttttc |
| 66181 | aaaaattgag tttctttata ttgctcaccc acttgataaa gaaacaagcc attttagatt |
| 66241 | aagacttgca agaagaaaca aaaaataaat tataaagcta aattttctat tcagcttgcc |
| 66301 | tctgcctcaa ctctaaaggt taaaaaaaat taaaaggtga tgctttgggg cctgctatca |
| 66361 | tttcttttag tatcatagtt agttaagctt agccagatgc aattcattct gattatttcc |
| 66421 | taaaagcaca gcaaaataat gtaggggtcg ttccaacatg tgttctcaag gaatacaatg |
| 66481 | tgactctaaa catagtcctg catttagaaa ctttaccaga aaaatgtaca gttgtaggaa |
| 66541 | catgacaata tttcagtggt tgccaaaatt ataatatttt tgatagacta acatataatt |
| 66601 | atactattgg acatagcaaa agttatcctt agttcattta tcctccctga gtctttatca |
| 66661 | aacaacaata aacaataaga cgttatagtt ttgtacttac tattctaaat aaattaatac |
| 66721 | tactttaaca ggttttattg gtattatgta ttttatcata accctgaaat caaacaggat |
| 66781 | tctttaagat cctctaaatt ttagaactgc atactttaaa ataaattaaa tagaaatact |
| 66841 | taggccaagc agatattctt tgaaaggtaa tattcatttt taaaacatat taataattaa |
| 66901 | aabittgttt ttatcttcaa gccaaacctc ttaatgggaa ttttggtata ctgagtctct |
| 66961 | tgagaaatat gtcatttcct tttaaagtta gagaaaataa atatggatga tttaggaatt |
| 67021 | gaaatataca atttttggaa tgccgttaat gatttatatt ttaaaataat tcagttaagc |
| 67081 | aatatgatgt attctagatt atattcctaa tatggtattt gatttaaatc aaatagtaaa |
| 67141 | ccaaggtact ttggatactg tttccaacta ataagataac cttctctctg ctcttcctcc |
| 67201 | ttccatttcc tttcttcata atcttttcta taaattactt tcaagcatat tttttaaaaa |
| 67261 | catagatcca aatctatggc taggcatggt ggctcacgcc tgtggtctca gctgctgagg |
| 67321 | aggcagaggc aggaggatcg ctggagccca ggagttcagg gctgcagtgt gctaggattg |
| 67381 | caccactgca ctcccagcct aggtgacaga gcatgaccct gtttcaaaaa caaaaaaacc |
| 67441 | ccacagagct gatgtcagtc tccagcataa aggcctttca gtgatttccc attgcttgta |
| 67501 | aaataagaca aaaatctttt ttgaaggtta tatttattga catatcatag ctgtacatat |
| 67561 | tttggggtca tgtgttatat gttgatacct gtacaaaatg tgtaatgatc aaatcagggt |
| 67621 | aattgggata tccatcatct caaacattta tcttttcttt ctattgggaa caatacagta |
| 67681 | cttctcttgc agctttttaa aaaatataca atatatcgtt attcactcca atttccctga |
| 67741 | tgtactattg aacactaaaa cttactcctt ctatttaact gtgcttttgt acccctcaac |
| 67801 | catcctctct ccatcctccc tacccttgcc cctcccagcc tctgataatc agtattcttc |
| 67861 | totctacttc catgagatcc actcgtttag ctcccacata aatgagaaca tgcaggattt |
| 67921 | tcaagaccac atctttatca caacctgcaa tctctgcccc atagcccctg ttcagcatca |
| 67981 | tctaatgtaa tgattcttga tcttgtgctt ccagtgctct agactttctc caattcctgg |
| 68041 | gcatcatcgt gtttcctctg ctcctgggcc cttgcacaca cacctttagg ttaacctggc |
| 68101 | cttcctgtct cctctttcct gaggtgctag ctcttcagat cttaatttgg gtgtcaagtg |
| 68161 | gctttggcaa ggcctcaggc aagactttct gacctatttg gattagaccc aatatttgta |
| 68221 | gtaaatgctt tatagtttcc catattttta aaatagtatt tattacagcc tataatcaca |
| 68281 | tagtttatag ttatgtagtc attgttactt gattaatgtc tccctcctcc acaaaggcaa |
| 68341 | aaacagatcc gttcactact tatcccagtg cctaccacag aatcagtgca caaatctctt |
| 68401 | ttagtatcac ataaaaactg tggacccttt catgagaaca aatgaaaata tagacacatc |
| 68461 | cacagcattt ccccccacag ttttagggag tttgttccct gacccctagc cttttccctt |
| 68521 | taaaccaggc tttaaaactg ctgccttgaa gattattaat aataaaatag ctgattaaca |
| 68581 | cacttgtgga attttcaaat aattggtctt tttgctaaac aaacgtttat gctatcaatt |
| 68641 | tagcttgatc ttttaaaaaa tatctgtttc tggagaggaa cagaaaaggt aactattggg |
| 68701 | tactgggctt aattcctggg tgatgaaata atctgtgcaa caacccccat gacatgagtt |
| 68761 | tacctatgtc acaaacctgc acatgcaccc ccaaacctaa aataaaagtt tacctattta |
| 68821 | acaaacctgc acatggaccc ccaaacctaa aataaaagtt tacctatgta acaaacctgc |
| 68881 | acatggaccc ccaaacctaa aataaaaccc caaacctaaa ataaaagttt atgtcacaaa |
| 68941 | cctgcacatg cacccccaaa cctaaaataa aaccccaaac ctaaaataaa agtttaccta |
| 69001 | tgtcacaaac ctgcacatgc acccccaaac ctaaaataaa agtttacctg tgtcgcaaat |
| 69061 | ctgcatatgc accgcgaaac ctaaaataaa agtttaccta tgtcacaaat ctgcacatgg |
| 69121 | acccccaaac ctaaaataaa agtttaccta tgtcacaaac ctgcacatgg acccccaaac |
| 69181 | ctaaaataaa accccaaact taaaataaaa gtttacctat gtcacaaacc tgcacatgga |
| 69241 | cccacaaacc tgcacatgga cccccaaacc taaaataaaa ccccaaacct aaaataaaag |
| 69301 | tttacctatg tcacaaacct gcacatgcac ccccaaacct aaaataaaag tttacgtatg |
| 69361 | taacaaacct gcacatggac ccccaaacct aaatataaac tttatatatg tatgtatata |
| 69421 | tatacatatg tatatacaga tatacatata tgtatctgta aaagaaacat atctatctat |
| 69481 | atctatatct agatatccag atgactagat gagatataga tatctgtttc tcttacagat |
| 69541 | aaggaagaaa attcttcttt attctctcat tcattagtta atatgagcaa aagccaacat |
| 69601 | tatatctttc ttactattgg tcaaccaaat aaatgcatac tttacatatg ggccaaatag |
| 69661 | atacctaagc ataccttagg taaaatctaa acttggaaaa cagaaaatca gtacattgtt |
| 69721 | agtaagcaaa gtaaataaat ttagtcttct attaaccatt tgagtttttt ctgtgaccat |
| 69781 | tgcatattca ttttctgcat tggtctaatt aggtgtcaca ttcacccagt gggtattgga |
| 69841 | gtgaaagtat ttattcaagg gtaggtgtgt atgctcagta gcataaaaat tgctctatca |
| 69901 | agagggaggt gttggagagg tttaggcttt agaaattgca aggcttcgct gggcactgtg |
| 69961 | gcttacacct gtaatcccag cactttggga tgccaagaca ggcagatctc ttgagcttag |
| 70021 | gaattggaga ccagcctggg caacatagtg aaaccctgtc tccccaaaaa agtataaaaa |
| 70081 | ttagccaggc atggtgttgt gcacctgtgg tcccagctac gcgggaggta gctgaggtgg |
| 70141 | gaggattgct ggatcctgga aggcagaggc tgcagtgagt aaagatcgca gcactgcact |
| 70201 | ccagcctggg tgacagagcc agaccctgcc tcaaaaaaaa aaaaaacaaa aaaaaaacaa |
| 70261 | aagaaaaaaa ttacaagggg ccaggggtaa gatgagcatt tagtgctaag tgtaagctgc |
| 70321 | atataggtga aataattttg cccagtctac ttagtactta aacatcagat atttgctata |
| 70381 | agaaaattgt ctactttaga tcacatggaa tcttttcttg ctgtatttca tctctttcac |
| 70441 | ctcccagctt tgcagaattt aggcttactt ttataataga tttacaatgt tgatatgagt |
| 70501 | tttgtcaact tcttcccaat catttgcttg tgtgaaaaat caggacttgc ccatgaaatt |
| 70561 | tctgaagttt gtctgctttt ttgttattgg ttgatttttt tttcagtttt ttttctatcc |
| 70621 | tattggtggg ctatatattt acaataatca caatatttat acattctgat ctgtaatgca |
| 70681 | gtcatatttt aaaatttata tagcattagt ttttattttg tcattttaat tttttaaaga |
| 70741 | tttgaagatt ttgagaatta aaaatttgta gttcatcaaa aatatggtat ttctcctgag |
| 70801 | aattctgacc taagacacct tctctgcaga ctgtaactct ccttgtattt tctcatctac |
| 70861 | ttttttttac ttttcccaaa cctttccctc caattcaggc ttctttcctg atttctatac |
| 70921 | tgtccactca accttgtgac ttggctgtcc ctcagacagg tcagtctgtc tcacttaaca |
| 70981 | gttagaacct attccctacc accttgccca aataagcaag taagtgaatc ctattctttt |
| 71041 | tccagtgttc bitgtcttag taaatgacat catcattcag ccagtoggtc aagccaagtt |
| 71101 | attcttcctt tcaccaaaac taattgctat tcaatctacc ttgcaaacat ctctaggacc |
| 71161 | tatccagtgt ctccacgctg ctaatcccgc tctgatctag gtcacattta ccccttacct |
| 71221 | agaccattcc tcttggacaa gcctaataac tggtctccta cctccattct tcctttcctc |
| 71281 | caatctattt gccacttttt agcagtgatt tttttttctt ttcttaatgc taagtcagat |
| 71341 | actgctaaaa actccttgat aacattgcct tattgggatg gagccagcat tcaactagtg |
| 71401 | tggtgataag cttatctttt ctaattgggt tgcttaggcc agcatctggt cagattgatt |
| 71461 | ggtacaaatg ttctaagttg ttagtgtttt gaatggaact cttctttcag acaaaatccc |
| 71521 | ttaaacataa tttcctgggc cctcaatgat ctggatgcta cctaagtgtc cagcctcaaa |
| 71581 | tgtcaatgct tttccccaca aacactactt accactaaga cccaaattct tttcacttct |
| 71641 | tgggttatgt caatatctgt cacctccagt attgcaatgc tgtactctgt gtttgaaaca |
| 71701 | tctccctaca catgatcccg tatctcgatg tatctagtta atgtctactc atccttaggc |
| 71761 | ctaaacataa atgtgacttc caggacattc bittatgtgc ttccacagca tccattgttg |
| 71821 | ctgtatctta gcatcattac cttatctgtc agattgtttt atctttgttt aattccctag |
| 71881 | gttttttttt tttttttttt tttagatgga gtctcactct tgttgcccag gtgggggagt |
| 71941 | gcagtggcag gaactcagct cactgtgacc tctgcctcct gggttcaagt gattatcttg |
| 72001 | cctcagcctc ccaagtagct gggattgcag gtgtgcacca ccacacctgg ctaatttttt |
| 72061 | gtatttgtag tagagatggg gtttcaccat gttagccagg ctggtctaga aactcctgac |
| 72121 | ctcaggtgat cctcccacct ctgcctccca aagtgctggg attacaggtg tgagccactg |
| 72181 | cacccagtct tattccatag gttctagact ccatgaaaac aaagattgcg tctgcttgtt |
| 72241 | acactgaaca atagcacagt agttggcaca tagcaaacac ttagaagtga ataaaatgaa |
| 72301 | tatttgaata aaaagaaaca aatttggggt caaaggtcaa attttgaata tgctgatttg |
| 72361 | aaagagtctg aatggtgttt aggtggagat accagaaggt ttgatgtaca attctaaaat |
| 72421 | tttagaacaa taactgggtc tttaaatata gatttgggag gaagcatcat tctgataaat |
| 72481 | gtcatttgaa gcctggtgtg cttattaatt cttagggtat tgatgtatca caagagaaga |
| 72541 | gcaaacatca gtaccaaggg aaagccaaca ttcatcatta gcbgtgccct gcatttccct |
| 72601 | ctttgatttt gtattatcat gcccttttcc tatccaaagg attcgcttat atttttgttt |
| 72661 | atagtataag gaattttttt ttttttgaaa cggagtctca ctcttgtcac ccaggctgga |
| 72721 | gtgcaatggt gtgatcttgg ctcactgcaa cctccacctc ctgggttcaa gcgattctcc |
| 72781 | tgcctcagcc tcccgagtag ctgggattac aggtgtccac caccacgccc agctgatttt |
| 72841 | gtattttaat agagataggt tttcaccacg ttggccaggc tggtctcgaa ctcctgactt |
| 72901 | caagtgatcc actcgcctcg gccacccaat gtgctgggat tacaggcatg agccaccgca |
| 72961 | ccojgcagat agttttaatt taaattcagt tagacaagtg catgtggtac acccattatg |
| 73021 | tgacgcttca tattatgtac taaaagcatg ctatgcacaa agtgtaggtg tacagtgatg |
| 73081 | gatagatcct gccctatgga actaacaaat tagcaagcga aatcaacatt tatcaagtaa |
| 73141 | ttaaaagtag tttaagtgtt gtgaaggaaa agtacaaagg cttatggaag tgcatatcca |
| 73201 | ggatgtttat aaaccaaggg aggtcgaggc ataaaatttc tgaaagcaag aatgcagtgt |
| 73261 | tcctacattt ttactaatat tccaagttct gaaaacgtgt acttaagtag cagcttttcc |
| 73321 | tgagtttatt caatttattg cattatcagt gtagtatgaa tgggagtgtg tgatgatttc |
| 73381 | cttcaaatat aaaaggaaat ttcttaatgc gttgttttct taaggtaaaa aaaaacaaaa |
| 73441 | aaaagacttt toittttgtt aaaagagttc caggcacatt ttgtagcaaa gccaccaatt |
| 73501 | ggcatgatgt aaattgtaag gacaatgtac cttaggtaat gttaaactca agttttttat |
| 73561 | agatacttca tagaaatgct tttttaaaat gggactcaat gaaggggagg ttatcagggc |
| 73621 | gtgtgaggaa gccagcbgtt cattgaaaag taaaagcata tgcactgtgc attccaaagt |
| 73681 | atactaatgg ataaaaactg cttcaaagtt ctccacacaa gtatctaagt ggctttgaaa |
| 73741 | agttaagtag attggatgtc ttttcaacct ctttcataaa catacacttt gagtatattt |
| 73801 | tcttatgaga agttgtatgt ttaagagata taaccaaaaa gtagaaaatg aattttgcag |
| 73861 | ggggtaaatt atttggtgat gaaagcagaa gcagaagaaa gtcatctgct tttgaggcac |
| 73921 | acatttggat taaaagttac ttgaatgtta gtatttacct tatatatttt actaaatcta |
| 73981 | ggaaagaata aagaaaaaca gctcaatctc tagagtcttc ctgaaaatgg tggggttaaa |
| 74041 | tcaagctcaa ggaactagaa gttctttgct gtgttcatta gtgccagact aaagaagcca |
| 74101 | gtttagttaa gaagctagct tgctatgagc taattctgat acatagaagc agcattattt |
| 74161 | taaattctac attgccatct taaaaacaag cagctacttc tttttcatta ttttataaag |
| 74221 | caataatatg agcaatcaat aatatgagca tgtatattaa caaagacatg ctcgattata |
| 74281 | tttaagttgg atgtttcata aaattttaca acaaaaaata tttaaaccta agtaaaatat |
| 74341 | gcaactatat aatgaaatta gaggtattat tttgcactgc agtcagagat atttcttcca |
| 74401 | ttaattaaac agaatactgc agcagtctgg aagattaatt tattacattc ctttgtattc |
| 74461 | agcaagtgga acgtgatttg tattgtatct ttagcaagtt aatatttggc aagcacagtt |
| 74521 | tttggaaatc aggttttatc ctgatgtgga aaaagaactc tatgccagta ccagttatca |
| 74581 | gaactttctt taagaataac atttgcctta agaacataat taatgcatct gtgaaaaata |
| 74641 | ccactttttt ccaacccaag gtacaatgag attcacgtat tttattcagt atttctaaaa |
| 74701 | ctcttcaatt gaggttttta ttttaattgt ggtactgtgt atacttttta tgcataacaa |
| 74761 | tatgttaaaa ttaattcagt accagattta aatctgttag gctatctgtt attccatttt |
| 74821 | ctttcccaaa cccaatttaa gttccacagg ccttttatag ctggccatgt ggttgcaatg |
| 74881 | ctaagtcaaa atgctaagac cttttcccat tttggggcat tatttcttta aattcgttgt |
| 74941 | agttttaaaa tctgatttta tagttattaa tcatattctt ctgggggtac atatatctgt |
| 75001 | acttaatgga ctaaagtttg gaatatttaa atttaaatta aatatggtag tgagatttgt |
| 75061 | tctgaagaga aactggttat atttaggata taatggtgtt ttaaaggaag gcattttttg |
| 75121 | tgtcatattt gtatccacac aaacattact tataatttag tactaaatta taactcaaga |
| 75181 | tcctctcagt aaggaagttc tacacctttt tcttgaatag ccagcaagat aagtacgatt |
| 75241 | aggaattgtt gctttatagc cgttgctatg ctgctgtaaa caacctattg tttcaaaatg |
| 75301 | tggctttatt tgaagtccat tctbittggt gagaattgac tattaaatat tcctattaaa |
| 75361 | gaatgccagt agattacaac tgggaacctc tcagttggaa acacttgcca tttcctcttg |
| 75421 | tttattatag ttttacagaa tatacagtca gatttttttt tcagtttcca accttgctta |
| 75481 | aatgcctttt tttatatgtc cttttgatct tctccaaaac caacaactgg tattatatgc |
| 75541 | ctaaagtata tgtcaggctt cataatgaat tgtattatta caactttttt tgtgtcctac |
| 75601 | attggacaca agttaatatt acttattggt tcagaacaat tcactttatt gtataaaact |
| 75661 | gttttagaaa aatcataatt ttcaaaatat caaattataa tagatacatt atcagttaaa |
| 75721 | tacatcatca atcagtattt actaaataaa catacttgga gctattagct agtgctgaat |
| 75781 | aatacataaa ttttatgtgc tatgaactta aatgtagaac agaaaatact attatataca |
| 75841 | caataaagca caaaatagtc tgacaatagt atcatgattc atattttctt aaaataatct |
| 75901 | acttactgtt tcaaacattg atatgtttgg atagatctaa actcttttga gaggaaattc |
| 75961 | tagttactat gttagttcag atcattatta atggcaagaa caaattgcat aagggaatta |
| 76021 | aactccagtg tttacggtaa gctatttggt atttcagaaa ttctaccata gtatctctct |
| 76081 | ctgtgtatat gtatgttctc attcaccctc accgtgaggt ctcttttttt ttctttttct |
| 76141 | tttttttttt tttttttttt tcggagaggg agtccacctc tgttggccag gctggagtgc |
| 76201 | aggtgcagtg gtgcaatctg ggctcactgc aacctctgcc tccojggttc aagaaactct |
| 76261 | cctgcctcag cctcccaagt agcbjggatt acaggcatcc gccacgccac ccagctaatt |
| 76321 | ttagtatttt tagtagaaac gggatttcac cabittgggc cggcbggtct tgaactcctg |
| 76381 | acctcaagtg atcctcccac ctcagcctcc caaagtgctg gggttacagg cgtgagtcac |
| 76441 | catgccccgc cctcattgtt aggtttctga tcagcataga ggcaaggtca ttactgatga |
| 76501 | ctgttatcct gagattctag caaggtgctt ggtatcatgt aggtactgaa taaatagtta |
| 76561 | ctgaaaacta aacaaggaaa gattttaaat aaaaatttta aaatttagaa tttctttaac |
| 76621 | aaaaatttaa ctaaatcttg gctgatgtga atgatgataa agaacaagag aaagaagagg |
| 76681 | aggaagagaa atccaaacat tacactgaaa tcaccattat tattatccct attttatagg |
| 76741 | taatgaaatg gaggcttggg gaagttaggt aatttttcca agtctcagaa gtagtaaatt |
| 76801 | gaagatccag gactctaatt actgtctgtt tctcaagact aagtaaactc ttgtttattc |
| 76861 | ttacatactt cgtggagtag ggaagttgcc agtgatttga aaatgttatg tatttatttt |
| 76921 | gggagggcgc catgcaagtt tataatgcac ttctaattat tattttttca gttcaaaaaa |
| 76981 | tgtatatttt ctaagcacat actatctagg aaaaaaagct tacggaaatt cttagtaacg |
| 77041 | tagggattaa atatagctat gtaaaaattc acaaagtggt ctgtaaacaa gaaaatagaa |
| 77101 | tttactatat ttattgaaaa ggcagtagaa actgtaatca tgtctaactg ataagagtaa |
| 77161 | gtcagtcaat atacacacat gagaccagca cagaaagaat tagaaaaatt aaagaggcct |
| 77221 | ctttagtatg tgacaagagc tggtataggt acaattatat cttaatacat acccagatgg |
| 77281 | catattccca gtagatatta ctaattttcc tgaagttgat agataaataa aactcaatta |
| 77341 | tcaagactct ttctactttt aatattatca aaggtatctt tctctggact cttaaaattt |
| 77401 | tttcacactg gtatcatcaa gtagcaggtc aaaatttagg gatagaggat gtgtttcaag |
| 77461 | agaagaacaa aattttttaa ctttaatttt tcaatctctg ttccttttga caaaattaac |
| 77521 | tgaattcagc ctgccaattg ctacttagac acaaaaaaga gaaatgagac attagttatt |
| 77581 | aagattttga ttttgattcc tttatgttgt gatttccttt atttccttta agtagttaaa |
| 77641 | ctgcaacaaa gatttttttc tctccaactg taaaaaagtc ttccatttta ccacttataa |
| 77701 | aagtcttcaa cttagaggaa aagacagttc tctaaacagt gatttggttt tagtgctgtt |
| 77761 | ttacctgtct ccttattctt ttagtcagtg tattcaaaaa cacatttctt gcagcctttg |
| 77821 | aaagcataga gccacactta gttttccagg aagatgcttt cttaatgtga attagctatt |
| 77881 | cttcatctca ccagaacatt cttcaaagct gctgttcctg aattcatgct tgatacccat |
| 77941 | gggtggatcc tgatttgtga acattatcta cctaggcatg gatgaggtct ctccatgatc |
| 78001 | actgatactg ctcacggcaa tctgtctacc atttggaaaa caggccgggg cagaatctgg |
| 78061 | aagggcagcc atcagtggga gcaggaatga tgctgccaag ggttaggggt gggaaaacat |
| 78121 | aaactcttct acaatagctg ttagttatct caaatagtgc cttaccttca ctatcaggct |
| 78181 | ctgtcctgcc tggtttcact ggagacaatg ccaaatcctg ctgtgcttac ttattacttt |
| 78241 | gtttttgcat tgctataaag gaatacctaa gactgggtag tttataaaga aaataggctt |
| 78301 | aattggctta tggttctgca ggctgtacag gaagcatgat gctggcattt gctcaccttc |
| 78361 | tggtgatgcc tcaggaagct tgcaatcttg gtggaagggg gcgcbggtgt gtcatatggc |
| 78421 | cagagtgtga gcaagagagg gaagggagag gtctcagact cctttaaaca accagctcta |
| 78481 | gcatgaacta acaggaaaat ctcacttctt accgaaggat ggtgctaagc cattcatgag |
| 78541 | ggatctggtc ccatgaccca ttcatctccc gccagctccc acctctaaca ttgggaatca |
| 78601 | catttcaaca tgagatttgg aggagacaca gatccaaacc atatcagatt acaaacactg |
| 78661 | tgcgtgtaag caaaattgtt tctgcbggtc tgagccactt gagccctttc ccactagtca |
| 78721 | catggagcac ctcttcttgt cccccgtctc cactgctgct tccttcctac agcccctgcc |
| 78781 | ctgccacagc ccttggaacc acatcgggtg ctggttatct cctgtcaatt cttgttacat |
| 78841 | ttgacttccc gaagacatgt ggccctgtga ccacacacac ctgtttgaag ctctcccctc |
| 78901 | tttctctggc acccgttggc ttgacagtct cccctcctga tgctccatca ttgttatgct |
| 78961 | tcttcccaga catattcact agttcctttg cctcttccca cctcatagat gttcctgtgc |
| 79021 | cccaggtttc tattcttaga cattttctct tttcatttag agtgctcatc aagtaatctc |
| 79081 | atcaatgtcc aagactccaa ttacagctta aatgttcatg acttttcaat ggctctccta |
| 79141 | aactctagac acacatatgt gactgcctac tagacctaaa ttcttaggta caccttccta |
| 79201 | ccatctacat tattgcagag cttaaataat caaattataa attatacaaa tataaaaaat |
| 79261 | aagtaatttt ataaatttat taaaaattgc tttttaaaac cactttgtat gtcttctgta |
| 79321 | gtgctagttc ttaatataga ttccatagat gtcttaaaag atagaaaaat tgtagcttat |
| 79381 | gaagacactg cagaattctc tcttaaaata ggtatatata gtgcaaagga ttactgccat |
| 79441 | tgcaatattt cacctaatca aagattttat ccaacgtgta taaacgggta tctttttaga |
| 79501 | taagaaactg gtcaaaatca taatagtggc atatgttgag gtcacatagt gaagttatct |
| 79561 | atgcagatca gacagtattg tggagaatac ctagaatctt gagaatttac acaaatagta |
| 79621 | ataacttaga tctgtatagc aaataatata catatcagat tcatttagtt tatgtaatct |
| 79681 | ttataatctg agaataatga gtcaagtgtt atccttagtt tactgattat caaagaaaaa |
| 79741 | tacagcttgg agaagtcaaa tgaattttcc aaatttatgc tacttataaa tgggagagct |
| 79801 | aataaaagcc acctgtctgg gtataaccct gtacctattt cttctaaagc atattgtttt |
| 79861 | ctaaagaaag tagttacatt ttaaatgaat atataaggaa tacatcttga atgaagacaa |
| 79921 | tatgcatttt ataatttaca tatttctgta tttcattatt cagaattcat ttaaaaagtc |
| 79981 | tccttgttgg catggacaaa attggcagct aatcctatcc cataaatatt ttcaatggtc |
| 80041 | ttcagctgat ggcgtgaaag ttcagcaaag gccaagtcac aatgctttga agtttgtcat |
| 80101 | cttttttatc actgctcaga ttgtcatgaa gacaccaagt aatacatgga tcaattatag |
| 80161 | ttaaatgact gcaagttgat cttatcaagc agttagtggg caagatttca cttttaccat |
| 80221 | tttttctggt aatgatttag agtgtaagaa cactaggaat ttaaatctac ttagttttac |
| 80281 | ttaatcaatg atgtatttgt ttatttaatt taaaacattg tttttggaga aggaagagaa |
| 80341 | cacaagaagt tcttgatcca taaataaggc gttcagaagg agaccagtta aactaaattt |
| 80401 | tgactgtaat tcagaattgt gtaaaatgcc ctactttatt ttaagctcat tattttcata |
| 80461 | attcctttac caagatagca gaaacatggc tttatctatt aaattataaa tgtagttttt |
| 80521 | tttgttttaa acataatcaa tttataagag atctaagaca tataaaacta cattgaggta |
| 80581 | gaaatttaat aaaaattaac tttacatcta tgtaacttac gtctatgtat tcagtttatt |
| 80641 | taaagtaggt cataaccaag tatttctggg ttgtgtggcc aatagctttg ctcctaaatc |
| 80701 | acaaagatgt ttctgtgtgt gacacttttt aaatccctgg aatattttaa atgttcattt |
| 80761 | caaataatct ataactttga aacagttctt ttttcttgaa cacattgttc tgtcacgtct |
| 80821 | aataggataa ccaattagtt ggttatccta attctaatat gcttcataac tagtgacata |
| 80881 | agataaacat atggagtatt tattactctg ataaaagata ctggttagga gcaagacagt |
| 80941 | ttttactttg taatcataaa aacatagcgt cctgcgtaca ctaggcagct acttatatag |
| 81001 | agctaatctc actctttttc ggactccaat atttaccata aaagtgcttt acagcatcta |
| 81061 | tataattttt tcttcttttt gtcccttctt tgtagttatt tgaaattaca gtgcctctct |
| 81121 | ctcaaggccc caaaccagta acaatcagtt ttgccaatca cacttcctgc cgatgcatgt |
| 81181 | ctaaactgga tgtttacaga caagttcatt ccattattag acgttccctg ccagcaacac |
| 81241 | taccacagtg agtatgaatt aaatctattt tttctgcatc ctctactaat attaaattat |
| 81301 | tttcaagtaa acataagtta aacaaataac ctctgtgaaa tttactgtaa tatactctgc |
| 81361 | ttcaaataca aaacaaagac aaaattttgt atagtataca atgaaaataa actgaaaatt |
| 81421 | aaaattcagt gggaagcgta ttttagaggc aaagtaattc acaatataaa agaagtatgt |
| 81481 | ctgtgaaata aaacacattc caccagtgtt cataaaatat cagtaaggta gcttaattga |
| 81541 | tttaacattc ctgaaatcag gtatgctaac tcataaatca tattaaagtt caaaacattt |
| 81601 | cagccttgat aagattttag gccaaaacaa aaagtaaata taaataattt tatatctatt |
| 81661 | agcattcagt tgctttcttc aatctcaaac ataaaaatat atatgbitgt gtgtgtatat |
| 81721 | gtgtatatat gtatctccat gtttcttatt tcagcaatat ttgaatagtg aaatagtgct |
| 81781 | taattacttg aaaaaaattt ctgttaatat catttcaaat tgacattcaa accattattt |
| 81841 | gttattcagg tttcctttcc atcctatttt tttggagggg caaatggcag catatacctc |
| 81901 | atgtgatcat ataggagaac ttatcacgtt ctcctgtatg atcatgttct gaccctgtga |
| 81961 | atagctgata atgaattaat atgcattact gcctaagatc tgagagtttt ctgccccaaa |
| 82021 | gtagggatgc aaccctttgt tccttaggat atccggtgca tatggatgaa acttacataa |
| 82081 | ctctagcatt tgtaacaaat gtataaataa attgatcaaa atacatatat attacaaaaa |
| 82141 | agaaaacctt acatttttaa aagactcaac aataaatgta atatgcaaac catggttttc |
| 82201 | cccactgaat cacgttgtac tactctgctt agtgtggcag atagggggac cccttgtttg |
| 82261 | tccagggaca gtttaggaaa acctggaaga tagcctaatt tgagtgacag agatctgtcc |
| 82321 | ccttttatgt gagaaagcaa agatcttaca gacatttgtg aataaatgta tgctaataca |
| 82381 | agcaagagac cactaccatc tgaactcaag aggatgccgt atgtgcaatt tcatccccgc |
| 82441 | aggctagaga gttctgttca ccttcctcag ccctgagcag aagccctcag tgactcctcc |
| 82501 | attctgagag ctttagccat tatctccata ctcatggctt ccaaaatgac atttgaagat |
| 82561 | ctaaccatat ttttgactta taatatttta tctaaatcta tcttctattg ctttgcttgt |
| 82621 | aattatatta gctgtaagta caaagagaaa gacttgttaa atcctttatt tctacattat |
| 82681 | tcatggcagt gttttctcat tttctttgag gccttgaaat cacagagttg tcattacttc |
| 82741 | ttcttcttct tctatcccat ctaaacacaa ttgattattt tggaggaggg ggagatatgt |
| 82801 | gttccaagct aaacttatat ttcatttcca tcactgccat tatcatccac ttcattatgc |
| 82861 | atgtctctga tctaatgcag tgatattaat actagttttc aagcatcaag tctttctcct |
| 82921 | gttgtataat gtcactgttt tatgaagtaa gctttaaaag gcatcgtttc attcatctca |
| 82981 | ccagaaacag tgactttcag ttgctcaaag aactgagcac aaatttctca ccaccctatt |
| 83041 | ctggtgtcag ccttcctttc ttgttttgtc ttccattatt cacccagtct gtgtttcacc |
| 83101 | aagtccgatt cccagaacgc caagctcatt tcctgctctg tatcttgttt ctattctggc |
| 83161 | cctggcttgt gttctgcctt tccaaagccc tctccatttc tcagagttca ggtaaaggtc |
| 83221 | tttctcctgc atttgtcttg tccgaatacc acggccaact ttgcttcttg aatacccata |
| 83281 | gcactcactg gattaacttc atcctcacat ggctttatca gggtctgcaa atgttgcatg |
| 83341 | tggaactgga ttatgagagt gtttccagta agtttatatt gtctgcaaca ttcagctaac |
| 83401 | aacactcaaa aatacttgag ccattcctgt gctctcagcc cctttacctg cattgtctga |
| 83461 | tttaaccctt aacaaaatca tctagaaggt cagcagcagc atttgcctta ttttacagat |
| 83521 | aaaggtggaa atcacactcc aaagcbgttg gctaaataat gtacataaat gcttgttaaa |
| 83581 | taaaatgact catttcctgg atgtatttta tagcatttgc catgttttca tcattactta |
| 83641 | ttcatataac tactatccta tacactgttt gaggtcaaga agagacagga agctacagca |
| 83701 | aaaagagcct gagtcttaga gtaagccata cctgattctg aattcagatt tgccactaat |
| 83761 | tcattctctg tgatcaggta ggtgttttat gtctctgaaa ctcagtttac ttatatataa |
| 83821 | actgtaaaga tgtaaagagg attgaatgaa gtactgaatg cttatgcaat gcttagcaga |
| 83881 | gtgtctggta tccagaaggt agtcattaaa gggcaaattt attattacca ttaatatcta |
| 83941 | agtctgattc atttcctcac ccatgtgttt ttcagtattt ttaaaaccac tatctacagt |
| 84001 | aagaaaaaca ttttatattc caaaccagga tgtgtggtat acacacacat agtgtgtctc |
| 84061 | tgtgtatata tatatgtcga tattagagaa ttttaaatta gctagataac ttcacatgta |
| 84121 | attaattatg tataagcata aaactaaaac aaattaccat ttaaaaatat tgtccttaat |
| 84181 | tatggtgctg ctcaagcttt ctcattatca caaccccaag gatcctttta taaacatttt |
| 84241 | ttccctaatc actttcccca taaaatttta atgtaacaaa tatactctgt ctttatacta |
| 84301 | tatgtatctc tgtgctttat acataaaaag gaagtgtaaa gtttactttt ttgttcaatg |
| 84361 | tagtgttaaa taacaaataa aatgtttaag ttaacattta aattaaaaat ttttaatctc |
| 84421 | ttaacagcta acataaattt ataattgtat ttgccaggaa acttttaagg taatctgttt |
| 84481 | acttatataa attgtaatat atcaaattac atatgcaaag taacaattga tatgaatata |
| 84541 | taatacaaat ataataattt ataaaaacat tcaaaatcac tatttttcca gcaaaagtaa |
| 84601 | aataattttt aaaataactt ctttaaaaat atttggagag cttaactatt aactttgctc |
| 84661 | agtatgagaa aacttttaac ttatatagat gataaatatt aatttagata ttgtcaactt |
| 84721 | tttcttttca tcatttgaca tgtaatggta tgactaacat ttgtagaatt aataataaaa |
| 84781 | tataaattat tattatttaa ttctcaaagc tcaagtcaca catgaaaaca ccaaggacca |
| 84841 | agcataagca atatccacag ggcaaccaat ggcagccaat aggcccacat aggtaccact |
| 84901 | cagtatatgt ttgaaatcac tcagtcaatt aagagaaaat cctccagtca tagccatcta |
| 84961 | gtcaccataa tttcatagct catatattgc aaacacttgg ggtgtgttcc gttgccaatg |
| 85021 | ctgttcatgt aatggccaat aaaaccaaat agaatttaag tattaaggaa tattattttc |
| 85081 | ttgggttttg gagagccaaa aatcattgag atattaagat tttagcccca tccaggcctc |
| 85141 | atacccaatt tttaccccct tagagatgat tttactccct ttatgaatat ttgccttatt |
| 85201 | attacgtgtg atatacccaa ataatttttc tattctgttt ttctttgtga aaatattggt |
| 85261 | ctcaaccctt tatgaattat ggcccacaat tcaataaaag ctacactagt gataatatat |
| 85321 | atatgatgga catgtgacta tgttataaaa ttctaacatt tgttaagatt taagaggaac |
| 85381 | aatcaccacc acggtggcta aaattaaaaa cactgacaaa aacaagtgtt agaatgtggt |
| 85441 | gcaaccaaaa ctcctatgtc accaatgggc attaaaattg ttcaatcatt tttcaaaaca |
| 85501 | gttgacagtt tcttatgaat ttaacatgta catatttcca cacaataact tgtgtacaaa |
| 85561 | tgttctttat tagtcaataa ctggaaacaa ctcaaatgcc catgaaagat gagtggatta |
| 85621 | acacatctta gtatatgcat acagtggaac attgctgagc aatgtaaaaa gaatgaacta |
| 85681 | ctgatacaca caagaacata aaaggatctc agagacatta agttgagtga aataagcttg |
| 85741 | gctaaaaaga gtacattctc tatgatttga tttacatgag gcccttaaaa gacgcaaatg |
| 85801 | tactctagag tgagagaacg caattcagtg tttgtttgag gatttggatc aggattgact |
| 85861 | gacaatgggc aagagagaca ttgtgaggtg ttagaaacat tctttatttt gattgtgaca |
| 85921 | gtagttaatg tggatacata aacttacgaa aagatgataa attcaaaata ggagcatgtt |
| 85981 | attgtatgca aattattccc caataaaatt gatttttgaa aagcctagaa aagaattcct |
| 86041 | ttattaagta caatttttta agtagcttag gtttcaaata gtagatttct cttttttttt |
| 86101 | tttttttttt tttttttttt gagacagatt ctcactctat cacccaggct ggagtacaat |
| 86161 | gacgtgatct cagctcactg caacctcctc ctcctgggtt caagcaattc tctgcctcat |
| 86221 | cctcccgagt agctgtgatt acagttgccc gccaccatgc ctggttaatt tttgtatttt |
| 86281 | tagtagagat ggggtttcac cattctggcc aggctggtct tgaactcctg accttgtgat |
| 86341 | ctacccgcct cggcctccca aagtgctggg attgcaggca tgagccacca cgcccagcca |
| 86401 | aaatagtaga ttttttaaaa cctttacaat aacattttaa gtcaaatctt tgattaggga |
| 86461 | gggagatttc ccacagtcat ccaaaaacta tacgttgagt cactaagata aagaatgctt |
| 86521 | ctagatccta ttagagaaaa caaagatgcg cttggctggc tctgaactta gagcacttat |
| 86581 | agtcaagtaa gaacaacaca tattatagtt acattattat tgttttattt tactaaatat |
| 86641 | tacaaagcac caagcatctg ccacacattg tctcatgttc atacaaatac tgccggtggc |
| 86701 | tccattcgta atacacatca catagtacaa ggctgaagag tgtggatgct gtagggagct |
| 86761 | tccagttttg agaatttagt ctctgatttc tctttgagtt tgagtaggtt ctgtaaactt |
| 86821 | tcttgtgaca catttttttt aatctacaaa agagcacata agtaagaatg ttacatataa |
| 86881 | catcatacag aatatttata agctaatctt cactgaaatc aatctgttca atagcattat |
| 86941 | accatatttg acataccata gccatgttaa tctgatattg tagaatagca tagtataata |
| 87001 | ataataactc ctaactcaag gabittgtga tctttataac cagcaatcca tgttaaatat |
| 87061 | tagcacagtg cctaaaacat attaagcatt caataaatga tcgctactat ttttactaac |
| 87121 | atcctacaga tttggaaatt gagtcttaga aatgttaatg tgtaaaatgc taaagagcca |
| 87181 | aaaaaactgc caggaaaata taaaaattaa aatcatttta tttctgaaac ccatgtgttc |
| 87241 | cccccaatat cttctaacat ttctagtatt tacagaaaaa ctttcaagtc tcaatatcag |
| 87301 | aaagtttcat aaaagccaga ggaagtagca attctcttta gcagacagag ttagatacca |
| 87361 | attttcatat tggtgttctc acagattatt ttttccaatt atttcctctc atattttctt |
| 87421 | caaatttaac tccatgtatt tccatgggcc ctttagtaga gactttcttt tcatggaggg |
| 87481 | agtcatttgt gattaagtag cgatccccta gattttcctc cttggtagta gtgtttgttt |
| 87541 | attcattcat gagacattta tgtcaggtct tctatctcta taatactgta ttaggaaatg |
| 87601 | tggggtattt ttaaatgaat aatataattc tttagctaaa ataactcatg tactagagta |
| 87661 | caaacaaaca atatttctag tatagtaagt gtctaaaaca ctatgctgta cttcattcac |
| 87721 | tcattcaaca aatagcattt gtgtttctgc tagatactaa taaggtggtt agaccacaga |
| 87781 | gatagaaaga tacatagaat tgttactcca gaagaaattc cattcttgaa ccagacatgt |
| 87841 | aaacatatga ctgaaatcag tgaaatcagt gtggtgagga agcatcttgg agacatggct |
| 87901 | acagtagaga ggggatacat gagtctggag aggtcaacag aatcacatat gcccagccaa |
| 87961 | ggatgggctg tttcttaaag tctcttgaga actactaaaa gtatatatgc agagatgtgg |
| 88021 | tatctgcagt tttgtattat agaaagaaca gcttggtggc aagggagtgt gtggattaga |
| 88081 | ggaagcaaaa cgggaggtgg aaaaattcgg gagtaatcat ttgaaataat ctgagtgaaa |
| 88141 | aataataaag atggtggcca cagcagtgga tatggggata gaaagaaaag aggtggaaaa |
| 88201 | gacgtttgaa atacaagaaa gcatatgact tgggaaccgc atatggggga tggtaaagtg |
| 88261 | ggagaagttg aggatgaaac tgtatggatg acattcaaaa gacaaggagc acctgttcat |
| 88321 | agtaggaact tacctgaaaa ggagaactga gtttttaaca catgttagct tgagtgcttg |
| 88381 | taatatttgt aagacatcag agtggtagag taattggaag agatgacctc aaccaaaaga |
| 88441 | aatatagcaa gtaagaagac aagatgagcc acagatgaaa ctgtggggaa atcaatattt |
| 88501 | aagaaacagt tatctgtaga gcagacacaa taatctggag aaacagtaat ctgtacggga |
| 88561 | gactgagaag aagcaatcag aacaatcgga ataacaacag agagagagac cacaaaagcc |
| 88621 | agtggagaca tgagttcaag gaaggaggaa gtggtaagag gtgccaaata ttagaaaggt |
| 88681 | tcaagaataa ctgggactta ctctgttagc tgaacagcat gaaatagaga tgtttattta |
| 88741 | ctaataactt accatactct gggcacagag agggagaatg tgttttgaga aagggggaga |
| 88801 | gaaagcaaga cagtgaaaga aattcacatt tacacatgag aaactgaatc agaaagggta |
| 88861 | agtaaatttc cccaatgtca cacaactaga aaagtagcaa agcagagatt caaactaaat |
| 88921 | ttgtttggat ataatccatt tcttttgagg tgtggctatg actgcatttt tattgttttt |
| 88981 | tagttgatac ataattgtac atatttatgg ggtatatgtg atattttgat acatacatat |
| 89041 | aatgcgtaat ggtcagctca ggatattttg gatatccatc acctcaaaca tttatcattt |
| 89101 | cttbitgttg taaacatttt aaatcttcta gctattttga aatatataat aaaatattat |
| 89161 | taactattgt taccctactg tgcbgtggaa tactagaact tgtttcttct atataactgt |
| 89221 | actttggaat gcattaccaa cctctcttca ttccccccac aactgaccca cacttcccag |
| 89281 | actctagtaa ccatcattct actctctact tccgtgagat tcactttttg gctctcataa |
| 89341 | atgagtgaga acatgagata bitgtctttc tgtgcccagc ttatttcact taacataata |
| 89401 | gcctccagtt ccctccatgt tgatgcaaat gacaggattg cattcttttt atggctaaat |
| 89461 | agtactccgt tgtgtatata taacagattt tctttatttt taacttctat aaattaaaaa |
| 89521 | atatcaaaca tcaaggacaa aacaaaaaca aaacaaaaaa gttcccttct accccaattt |
| 89581 | gaaatgtaac aactattttt ttgtatttac taaagataca acccaaatcc ccagtcatca |
| 89641 | ttcttcactc ttcattccca gaagtaacca ccactcaaaa attgtattat tctcactctt |
| 89701 | ctgtattttt atggcatctg gatttattaa cataccagaa gatattatac agtgcagctt |
| 89761 | tgagtgtttt gtattttaag ttaaaatgtt ggcattactt tttttctctt gacattatgt |
| 89821 | tttacagata tagtcatatt gctatctgta cacctggtgt attcatttaa taactatata |
| 89881 | gcattccatt aaataaacac aagtttttat gtttttttta ttctgtgacg atgtactata |
| 89941 | gggaagtcaa tatacactac agattagcaa gagagtacaa tcaaagagga gagagtgatg |
| 90001 | tcaaatagac aaggaccttg aagttaatag tgctaaattt attagttatt tggttagcat |
| 90061 | ggacaatgtc cctaaagatg taataaaata acacgttctg tgcacagtta ataaaccagg |
| 90121 | ttgatttcag tcttaagctg tgaaagcaat tggatattaa atgaaaacac aatactgtga |
| 90181 | ttctaaagct ttgagcagca gcctagggaa tttcacctat tctgtagagg tattagggga |
| 90241 | gcagaggttg tttctgggta gaggaatgat tgacaagaca abittcagca tagccaagaa |
| 90301 | atcttgaatt atttttaatg gataataaat atagaagata ggtattattt caatttggaa |
| 90361 | gacagtcgcc tcgtggtgaa aaagagaaaa gggatgaaaa aagatgagga aaaaaaatgg |
| 90421 | ataaatctag cctgaaggct aatttgcata tttatttatt tgctgtcttt tatttctttt |
| 90481 | attaaaatgt tgacattgtt tactcagtaa aacttatttg cttgcaagaa gttacactta |
| 90541 | ctagggttta tttaagaaga ttttattctt atgagaacat gtcttatttc caaggaatag |
| 90601 | agtaagtaga tttatagcca aggaaacatt tgatttggaa cttgaggtct ccgtgttttt |
| 90661 | ggtotattaa tatttaacag atcctcagtc caaatgccta gatgottaaa tatccataag |
| 90721 | ttgtactttt agccataatg cttcactctt tcctttttaa tttgaaggtt atacattatt |
| 90781 | gctttaccaa aagacaatga agcaaaatag cctaataaca taaatttaat aaactgtatc |
| 90841 | agagcagaaa tggagagata gcttagcttc cagttaattg gaccacagtc tcgtactaga |
| 90901 | tcatcagaaa ctactgtttt tcagcatttt aaaacatgca tctttagtct cccctgaaat |
| 90961 | tatcctcttt gccagttcaa aatctttatg tccatatacg gttatttttg aaatcgtaag |
| 91021 | tcatatgtct gttcatcccc tttcctataa agctcattat ctaaacattg tctcacactt |
| 91081 | caaaggatca cctgttgatg tgaatggatt taccagtgga actcaggcaa gagattccag |
| 91141 | gctgtgagcg ttactgtttt tgtaaaggga aggtaacttt tatatatagt ttgcctgcct |
| 91201 | ttggacagtc ttgtttctac cttctaaaat acgataattg aaagcacagc gttcctatgg |
| 91261 | cttgctgata gattgtgaga aataacagca aaatatatac agctgaggag attgcatcaa |
| 91321 | tacatctctg caccgaaatt atggcagtga tttgcctaga attgggggct attagatcaa |
| 91381 | agattgtcct aaagtttaaa gttacattca accaaacaca tggacaattt ttgttaatat |
| 91441 | catattagac cagatttacc agttgttttc taaaatttaa tatacatttt ttaaccattt |
| 91501 | taggttacag aaaaagcaga aagtatagag agttttcata taacatcctc tttcacgagt |
| 91561 | ttcctctagt tttaacatct tgcattagca tggtacattt gtaacagttg aggagccgat |
| 91621 | actgacatgt gatcgttaac taaaatccat agcttacatt agggttccct cttttttggg |
| 91681 | tgtaagttct gtggattttg acaaaggtat aaatgatgtg tcaatcatta cagtatcatg |
| 91741 | cagaatactt ttactgccct aaaagtctcc gtgttccgcc tgttcatttc tcctcccctg |
| 91801 | tattcctggc atcaaccagc cactttgatg tcatatcaac tcttataccc tcataacgtg |
| 91861 | ttttttattg tcatcattgt tttgtttttg tttttctgtt aatgacgtat ggctgtgaca |
| 91921 | aggtaatgag accagojgct gttgttggag gacctttttt cttaattcct ggttacttat |
| 91981 | ccttgaatta tgtgacaagc tgataaatcc aataaccatg gattttccat tgtttcaacc |
| 92041 | tgccaatact tctctcaagc ttgtatatcc aagaaaatat aaaaaatagt agagcagaaa |
| 92101 | attacaagct tccatactta tcctactctc cctgtgtccc catccccact tctggtggct |
| 92161 | ttccaactca gttaagtcct gtacttagcc agttggtgac cacacaatgt gacatgtttt |
| 92221 | atatccaagt cagtctcaga ctaggtgagt tttttatgtg gcagattact gcttagttta |
| 92281 | tactcagaca aaaaggaaaa aattaaacat ataaacaccc tttttttttt ttcgagagtc |
| 92341 | tcatgcbgtt gcccaggcta gagtgcagtg gcgtgatctc agctcactgc atcctctgcc |
| 92401 | tccojggttc cagcgattct cctgcctcag cctcctgagt aactgggatt acaagcacgt |
| 92461 | gccaccacac ctggctaatt tgtatatttt tagtagagat ggggtttcgc catattggcc |
| 92521 | aggcttgtct caaactcctg acctcaggtg atctgcccat ctcgacctcc caaaatgctg |
| 92581 | ggattacagg cgtaagccac cgtgcccagc ctaaacccat gttttaaatt aatgcaatga |
| 92641 | ttgtattagc ctttcaaaca ttaagactgg caaaattgtt acaactatgg agttttcatt |
| 92701 | gattcatcct actcaccatc ttttccttta atatctgaac aaaccccaac tctgttcact |
| 92761 | gttctccctg tgagtagact aatggaacaa gagcaaacag taacacaaac agacgctaac |
| 92821 | acaagttcat gcagaatcaa taaaaatcag tacaacagaa gataagtcta tgtgtttttg |
| 92881 | atacatacga ttaagcatgt gcctttttaa caatttatat aaaacctaaa atatatgtat |
| 92941 | ttctgatttt tacctgtagt actgaagaag ttacttaata acgttgaata taaaggccac |
| 93001 | ttttacttaa ccaccttcca ttcactatta actgcbgttt ccaaagtgta agcaaatcag |
| 93061 | tctctgtgta catagtcaag tgtatacaag cgtcaggcgt aacaaactca agatgaacat |
| 93121 | gacagttcaa agatatttgg gacaaaattg ttgaagcatt tttacccagg gctctgtagc |
| 93181 | tctgacaatg aaagaatata gttgctcttc cagctgctat tcagacagaa agcttgggca |
| 93241 | agaagggtct gtatctatgt tcttcataat acaattacaa gtttgaactt cagataacat |
| 93301 | cagcagttgg catgtggaaa accaaaaccc tattttggta tttatcaaga ttgttaatgg |
| 93361 | agtcaggttt cccttatttg tttctttaat ggggtacaga acatcctgtt ggataacccg |
| 93421 | ctgagtgaca tgacgatgct ctgaaggaat gcatgagagc ttgtggtacc tgccttgaaa |
| 93481 | catgggtttc actaatgctg gtggctcaca cttcccattg aacaagacta gagataggaa |
| 93541 | ggctatttga gggacacagc tatggaacca taggtgccac atggtaagcc aaatttttat |
| 93601 | ttgttgtgtt gttgtgaaaa accttattaa aagagcttcc aatgagagta cttgattaat |
| 93661 | aacacagttc gtatctatag aaataatttg cttttcaaga aaatcatcat gtgctacagt |
| 93721 | tgaattgaca ttaatgttat cattcatttt gaatgatctg tgaagtattt taagagagat |
| 93781 | ctggggaagt aaatcaataa gtagtttaac ataaatcaag gtgcagttaa tttttttcaa |
| 93841 | ttagaaatat attacaaaga ttctgtcatt tccaacaacg tgaaataacc tggaggaaat |
| 93901 | tgtgctgagt gaaataagcc agacacagaa agatgcatat tactgatctc ccttatatat |
| 93961 | ggaatctaga aaagtagaat tcatagatac agaatagaag agtggtcacc acggtcttgg |
| 94021 | gggtggggga catggggaaa tgttagagtg tgacaacttg cagttacaag gtgaatatgc |
| 94081 | tctggagacc taacgtatag tacagcatag ttactctact caatagtatt ctcactgcac |
| 94141 | cccccaactc ccccacacac acagtaactc tttgaggtgt ggatatgtta attagcttga |
| 94201 | ttttggtaat catttcacag tgtatacata taccaaaaca tcactttgta taccttatat |
| 94261 | atgtacaata tttatcaatc atacttcaat aaagctggaa aaatgcatga atattatata |
| 94321 | tatgtatatg tatatacaaa tgtataagag attatagcag attatagctc tttgaaaaag |
| 94381 | aataacattt cagcccagtt ctgactaaga ccaaacaaaa ggtgatagca tgttttagtt |
| 94441 | ccttaaatgt ggatttgagg agtcaagaaa tctccaagtg taggaaaacc tccgtggcaa |
| 94501 | agagtgtaga atatgagaat cacaaaaata gcatgcacaa aatagcctgc tgtgatgttg |
| 94561 | aaagtataag agctagtaat tattattatt attattattt ttatttttat tattatactt |
| 94621 | taagttttag ggtacatgtg cacattgtgc aggttagtta catatgtata catgtgccat |
| 94681 | gcbggtgtgc tgcacccact aacttgtcat ctaccattag gtatatctcc caatgctatc |
| 94741 | cctccccctc cctccacccc acaacagtcc ccagagtgtg atgttcccct tcctgtgtcc |
| 94801 | atgtgatctc attgttcaat tcccacctat gagtgagaat atgoggtgtt tggttttttg |
| 94861 | ttcttgtgat agtttactga gaatgatgac ttccaatttc atccatgtcc ctacaaagga |
| 94921 | catgaactca tcatttttta tggctgcata gtattccatg gtgtatatgt gccacatttt |
| 94981 | cttaatccag tctatcattg ttggacattt gggttggttc caagtctttg ctatcgtgaa |
| 95041 | taatgccgca ataaacatac gtgtgcatgt gtctttatag cagcatgatt tatagttctt |
| 95101 | tgggtatata cccagtaatg ggatggctgg gtcaaatggt atttccagtt ctagatccct |
| 95161 | gaggaatcgc cacactgact tccacaatgg ttgaactagt ttacagtccc accaacagtg |
| 95221 | taaaagtgtt cctatttctc cacatcctct ccagcacctg tbitttcctg acttttgaat |
| 95281 | gattgccatt ctacgtggtg tgagatggta tctcattgta gttttgattt gcatttctct |
| 95341 | gatgaccagt gatggtgagc attttttcat gtgttttttg gctgcataaa tgtcttcttt |
| 95401 | tgagaagtgt ctgttcatgt ccttcgccca ctttttgatg gggttgtttg tttttttctt |
| 95461 | gtaaatttgt ttgagttcat tgtagattct ggatattagc cctttgtcag atgagtaggt |
| 95521 | tgtgaaaatt ttctcccatt ttgtaggttg cctgttcact ctgatggtag tttcttttgc |
| 95581 | tgtgcagaag ctctttagtt taattagatc ccatttatca attttgtctt ttgttgccat |
| 95641 | tgcttttggt gttttagacg tgaagtcctt gcccatgcct atgtcctgaa tggtaatgcc |
| 95701 | taggttttct tctagggttt ttatggtttt aggtctaacg tttaagtctt taatccatct |
| 95761 | tgaactgatt tttgtataag gtgtaaggaa gggatccagt ttcagctttc tacatatggc |
| 95821 | tagccagttt tcccagcacc atttattaaa tagggcatcc tttccccatt gcttgttttt |
| 95881 | ctcaggtttg tcaaagatca gattgttgta gatatgcggc gttatttctg agggctctgt |
| 95941 | tctgttccat tgatctatat ctctgttttg aaccagtacc atgcbgtttt ggttactgta |
| 96001 | gccttgtggt atagtttgaa gtcaggtagg gtgatgcctc cagctttgtt cttttggctt |
| 96061 | agggttgact tggtgatgca ggctcttttt tggttccata tgaactttaa agtagttttt |
| 96121 | tccagttctg tgaagaaagt cattggtagc ttgatgggga tggcattgaa tctgtaaatt |
| 96181 | accttgggca gtatggccat tttcacgata ttgattcttc ctacccatga gcatggaatg |
| 96241 | ttcttccatt tgtttgtatc ctcttttatt tccttgagca gtggtttgta gttctccttg |
| 96301 | aagaggtcct tcacatccct tgtaagttgg attcctaggt attttattct ctttgaagca |
| 96361 | attgtgaatg ggagttcact catgatttgg ctctctgttt gtctgttgtt ggtgtataag |
| 96421 | agtgcttgtg atttttgtac attgattttg tatctggaga ctttgctgaa gttgcttatc |
| 96481 | agcttaagga gatttttggc tgagacaatg gggttttcta gatatacaat catgttgtct |
| 96541 | gcaaacaggg acaatttgac ttcctctttt cctaattgaa taccctttat ttccttctcc |
| 96601 | tgcctaattg ccctggccag aacttccaac actatgttga atagtagtgg tgagagaggg |
| 96661 | catccctgtc ttgtgccagt tttcaaaggg aatgcttcca gtttttgccc attcagtatg |
| 96721 | atattggctg tgggtttgtc atagatagct cttattattt tgaaatatgt cccatcaata |
| 96781 | cctaatttat tgagagtttt tagcatgaag ggttgttgaa ttttgtcaaa ggctttttct |
| 96841 | gcatctattg agataatcat gtggtttttg tctttggctc tgtttatatg ctggattaca |
| 96901 | tttatttatt gatttgcata tattgaacca gtcttgcatc ccagggatga agcccgcttg |
| 96961 | atcatggtgg ataagctttt tgatgtgctg ctggattcgt tttgccagta ttttattgag |
| 97021 | gatttttgca tcaatgttca tcaaggatat tggtctaaaa ttctcttttt ttgttgtgtc |
| 97081 | tctgcctggc tttcatatca gaatgatgct ggcctcataa aatgagttag ggaggattcc |
| 97141 | ctctttttct attgattgga atagtttcag aaggaatggt accagttcct ccttgtacct |
| 97201 | ctggtagaat tgggcbgtga atccgtctgg tcctggactc tttttggttg gtaagctatt |
| 97261 | gattattgcc acaatttcag atcctgttat tggtctattc agagattcaa cttcttcctg |
| 97321 | gtttagtctt gggagagtgt abitgtcgag gaatttattc atttcttcta gattttctag |
| 97381 | tttatttgca tagaggtgtt tgtagtattc tctgatggta gtttgtattt ctgtgggatc |
| 97441 | ggtggtgata tcccctttat cattttttat tgcgtctatt tgattcttct ctcttttttt |
| 97501 | ctttattagt cttgctagca gtotatcaat tttgttgatc ccttcaaaaa accagctcct |
| 97561 | ggattcatta atttttgaag ggttttttgt gtctctattt ccttcagttc tgctctgatt |
| 97621 | ttagttattt cttgccttct gctagctttt gaatgtgttt gctcttgctt ttctagttct |
| 97681 | tttaattgtg abittagggt gtcaattttg gatctttcct gctttctctt gtgggcattt |
| 97741 | agtgctataa atttccctct acacactgct ttgaatgcgt cccagagatt ctggtatgtt |
| 97801 | gtgtctttgt tctoittggt ttcaaagaac atctttattt ctgccttcat ttcgttacgt |
| 97861 | acccagtagt cattcaggag caggttgttc agtttccatg tagttgagca gttttgagtg |
| 97921 | agattcttaa tcctgagttc tagtttgatt gcactgtggt ctgagagata gtttgttata |
| 97981 | atttctgttc ttttacattt gctgaggaga gctttacttc caagtatgtg gtcaattttg |
| 98041 | gaataggtgt ggtgtggtgc tgaaaaaaat atatattcca ttgatttggg gtggagagtt |
| 98101 | ctgtagatgt ctattaggtc cgcttggtgc agaactgagt tcaattcctg cgtatccttg |
| 98161 | ttgactttct gtctcgttga tctgtctaat gttgacagtg ggtgttaaag tctcccatta |
| 98221 | ttaatgtgtg ggagtctaag tctctttgta ggtcactcag gacttgcttt atgaatcttg |
| 98281 | gtgctcctgt attgggtgca tatatattta ggatagttag ctcttcttgt tgaattgatc |
| 98341 | cctttacgat tatgtaatgg ccttttttgt ctcttttgat cttbittggt ttaaagtctg |
| 98401 | ttttatcaga gactaggatt acaacccctg cctttttttg ttttccattt gcttggtaga |
| 98461 | tcttcctcca tccttttatt ttgagcctat gtgtgtctct gcacgtgaga tgggtttcct |
| 98521 | gaatacagca cactgatggg tcttgactct ttatccaatt tgccagtctg tgtcttttaa |
| 98581 | ttggagcatt tagtccattg acatttaaag ttaatattgt tatgtgtgaa tttgatcctg |
| 98641 | tcattatgat gttagctggt tattttgctc attagttgat gcagtttctt cctagtctcg |
| 98701 | atggtcttta cattttggca tgattttgca gcggctggta ccagttgttc ctttccatat |
| 98761 | ttagcgcttc cttcaggagc tcttttaggg caggcctggt ggtgacaaaa tctctcagca |
| 98821 | tttgcttgtc tgtaaagtat tttatttctc cttcacttat atgaagctta ttttggctgg |
| 98881 | atatgaaatt ctgggttgaa aattcttttc tttaagaatg ttgaatattg gcccccactc |
| 98941 | tcttctggct tgtagggttt ctgccgagag atcctctgtt agtctgatgg gcttcccttt |
| 99001 | gagggtaacc agacctttct ctctggctgc ccttaacatt ttttccttca tttcaacttt |
| 99061 | ggtgaatctg acagttatgt gtcttggagt tgctcttctc gaggagtatc tttgtggcat |
| 99121 | tctctgtatt tcctgaatct gaacgttggc ctgccttgct agattgggga agttctcctg |
| 99181 | gataatatcc tgcagagtgt tttccaactt ggttccattc tccccatcac tttcaggtac |
| 99241 | accaatcaga catagatttg gtcttttcac atagtcccat atttcttgga ggctttgctc |
| 99301 | atttcttttt attctttttt ctctaaactt cccttctcgc ttcatttcat tcatttcatc |
| 99361 | ttccattgct gatactcttt cttccagttg attgcatcgg ctcctgaggc ttctgcattc |
| 99421 | ttcacgtagt tctcgagcct tggttttcag ctccatcagc tcctttaagc acttctctgt |
| 99481 | attggttatt ctagttatac attcttctaa atttttttca aagttttcaa cttctttgcc |
| 99541 | tttggtttga atgtcctcct gtagctcaga gtaatttgat cgtctgaagc cttcttctcg |
| 99601 | cagctcgtca aagttattct ccatccagct ttgttccatt gctggtaagg aactgtgttt |
| 99661 | ctttggagga ggagaggcac tctgcttttt agactttcca gtttttctgt tctgtttttt |
| 99721 | ccccatcttt gtggttttat cgacttttgg tctttgatga tggtgatgta cagatgggtt |
| 99781 | ttoggtgtgg atgtoctttc bitttgttag ttttccttct aacagacagg accctcagct |
| 99841 | gcaggtctgt tggaataccc tgcbgtgtga ggtgtcagtg tgcccctgct ggggggtgcc |
| 99901 | tcccagttag gctgctcggg ggtcaggggt cagggaccca cttgaggaag cagtctgccc |
| 99961 | gttctcagat ctccagctgc gtgctgggag aaccactgct ctcttcaaag ctgtcagaca |
| 100021 | gggacattta agtctgcaga agttacttct gtctttttgt ttgtctgtgc cctgccccca |
| 100081 | gaggtggagc ctacagaggc aggcaggcct ccttgagctg tggtgggctc cacccagttc |
| 100141 | gagcttcccg gctgctttgt ttacctaatc aagcctgggc aatggcgggc gtccctcccc |
| 100201 | cagcctcatt gccgccttgc agtttgatct cagactgctg tgctagcaat cagcgagact |
| 100261 | ccgtgggcgt aggaccctcg agccaggtgc gggtataatc tcgtggtgtg ccgttttttg |
| 100321 | tttttttttt gtttgtttgt ttgtttgttt ttgagacgga gtctcgctct gtcgcccagg |
| 100381 | ctggagtgca gtggcgggat ctojgctcac tgcaagctcc gcctgccggg ttcacgccat |
| 100441 | tctcctgcct cagcctccca agtagcbggg actacaggcg cccgccacta cgcccggcta |
| 100501 | attttttgta tttttagtag agacggggtt tcaccgtttt agccgggatg gtctcgatct |
| 100561 | cctgacctcg tgatccgccc gcctcggcct cccaaagtgc tgggattaca ggcgtgagcc |
| 100621 | accgcgccgg gccggtgcgc cgttttttaa gcccttcgga aaagcgcagt attcgggtgg |
| 100681 | gagtgacccg attttccagg tgctgcccct cacccctttc tttgactagg aaagggaact |
| 100741 | ccctgaccac ttgtgcttcc caagtgaggc aatgcctcgc cctgcttcgg ctcgcgcacg |
| 100801 | gtgcgtgcac ccactgacct gcgcccactg tctggcactc cctagtgaga tgaacccggt |
| 100861 | acctcagatg gaaatgcaga aatcacccgt cttctgcgtt gctcaggctg ggagctgtag |
| 100921 | accggagctg ttcctatttg gccatcttgg ctcctcccca agagctggta attattaccc |
| 100981 | aacgtttaga atataatgta acagaacgta tttggaatac atttatcttt taatatttca |
| 101041 | aaggagagat aaatgcaaac taagatttta tttatcatta aattcattgt tctttagttt |
| 101101 | gaaaaacaca tatactcata tttttgtcac gtgattttaa ccagcataaa gcaatagctg |
| 101161 | ccacaccaaa gtcaagtgaa gctgtgaaaa taattaatga aacaattctg ataaaagcat |
| 101221 | ctttatcctt catacaggtt ataggcagga ttgtggttgt gcctgtgtgt gtgtgtggtg |
| 101281 | gggtoggtgg ggggatagga aagttagttt attcacatga ttctcaacat agacatacct |
| 101341 | tgcaaataat tgtgcaattc cctgctttgc tttgcagaca gaatgtcttt gaatcaatgt |
| 101401 | cttttataaa tacactatac aaaaaacata attataaacc tttaaagtat ttatgcatac |
| 101461 | tttaatattc agaactagaa gagaaatttc tgtaaggaga aatgctttgg agattaaaac |
| 101521 | gtaaaggaga taaccaaatt ttactaaacc tctatccatc atgaccacat ttcctttcat |
| 101581 | tctaaaataa aaatattttg gaaatgttga ccccctgccc accatttttg cctgagaagt |
| 101641 | tttaaatgcg aagaacttgc tcctcacttt tgaagcacgg tgctttcttt aggaaccaat |
| 101701 | ctgtatcaca tgcattctat tggtttgtat tttattacat atcattctat tacattttaa |
| 101761 | aatgcatttc tgagcccatg tcattgattt catgattcat taatgggttg caagcagcag |
| 101821 | ctggaataac actggcttag gtaatggcag tataaatcac abittggtaa aatgaaagat |
| 101881 | gcctttctac caacacgtta taatggccac tcgatgccaa catggcagtg tgttacttaa |
| 101941 | accatatatc aatcaacaca gaagcgacat aaccaaaatg tttttaccat catttataga |
| 102001 | agattatgag tttcatgcag ccaggattaa ttgcattgct attatagaac ttaatataag |
| 102061 | ttgtatcata tttgatggaa ggatgctaac tatcaagagg atataaattt taaaaacaat |
| 102121 | gatactgttt tggataagtc ctgactgtct gcattttatc tagaacaata tatgttcatg |
| 102181 | attaacctag aaaataatga caaaaatgcg caatgagtag agacttgccc ttggaattcc |
| 102241 | taaaattatt aggaaggtac aatgttctcc aagaaatatt ggtaagtgaa aaaaacaagg |
| 102301 | tttacaataa tgtgtaacgg atgctatctg tgtaacaaaa tgtgaaaaaa catatatgca |
| 102361 | attttttggc aagaagatac cctgaaaaca taaaccaaaa agccaaaaaa aaaaaaagaa |
| 102421 | acttgctgat gatacagaac ttctctgact gtacattttt ctcatagtct taactctgat |
| 102481 | aattacatac atgtttgaca ttctcaaaag taagaacata gaagtacata atatatgcag |
| 102541 | gataaagcaa ataacagttt atgtgaagat tgttagaagc caaggttttc atggaagtta |
| 102601 | ttagtatgaa gtcaaagtag tacattaaaa tccagtaatg ttaattggat ttggaagtaa |
| 102661 | cagtatgaaa ttttttctct aaaaatgtgt gcaggaatct cttgcttaag atcagtaatc |
| 102721 | tattcccaaa aatagatttt gagagcacat ttctgttcta aatgggaaca attatagtga |
| 102781 | atggaaggta aaccaaaaca tagctatttc ctacaaaata attgatacct aataatgcct |
| 102841 | gtagaaaagc atagaaaagt gacaaactct cttgataaaa tctaaaatgt atattgtttc |
| 102901 | ctaatcagca attattgatg ttgctaacat acagttgctt tgtatctagt tacatggacc |
| 102961 | gtgtatatgc tgtatgagaa attgtcactt tgtggtatag catagcaaat aacacagcaa |
| 103021 | tcaaaaagtt aaaagtcaaa attaaaataa ataaaagacc cataatagac tgtttttcac |
| 103081 | cttgctaaag gagaaatgac tcttgaagaa actcaagaag ggacaaagaa aggtcaaatc |
| 103141 | agtcattgct atttgcagaa ggtgatgggt ggatggagga caagggggca atcttcgaca |
| 103201 | aactgtcata tgaagaggaa tgaagagacc ttccccatgt ctgtgtctag tagatgctgt |
| 103261 | agagacttgc tggacaggaa agctttggta aatcttcaga aatgatgttc aagctgaagg |
| 103321 | aagatgttca agctgcattt tggttgcaaa atgcagattt gcttgttttt ctgttgaaaa |
| 103381 | attcctctat gtgatgctgt aagagttacc aggctattat taaaagaaag atgtattgtc |
| 103441 | acactgagta tgtctgcaaa actttcttag taactggcct gtttgtttat actcaatgca |
| 103501 | catgttaaga tggctacata ggattcttac tatgttctat caatttggaa tgtaactcaa |
| 103561 | cattcttcca gcacataaag ttgtttacaa tatataatga gtgtgaaaga tataaataaa |
| 103621 | tacttctatt tgatgtctac accaacatta gatgaaaaaa tgaggtagtg agaagttgat |
| 103681 | atatatcctg taaattagca tatttaaaac caaaaatcct tctactgggt aaatattaac |
| 103741 | taggaaaaca ttctacagga tataatgcat ttttctagct ctgccccctg aaaaggtcta |
| 103801 | gtagtaatgt gatctgatgg cactaaacac ttctgatctc aaatgatagc ctctaaaatg |
| 103861 | ctgttttcca acaaagagaa ttagggctcc tgaagaaatg gctgatgcca ggtgtggagg |
| 103921 | agaaaatgag caagctgagc ttgtgatata tgttcacccc agagagggct catgtcacgt |
| 103981 | gggcaccaac agagaggggt ctcaggtagc aacagtgggg ccattggacc atcaaaggag |
| 104041 | caattagggt acttgactga agcctgtagg ttcataattt ttactctaaa acaaggaagg |
| 104101 | aaggtgggaa gaaaggggaa aggaggggaa gggaaggaag aaaggaggga gggagggaag |
| 104161 | gaaggaagta aagagctaga acaacaatga aacaaaatat ctttgataac tttttggggg |
| 104221 | agtacagagt ggaaattttg catttctgga ggctttacaa gatggggatc tgtgcttcag |
| 104281 | aaataagtca gtaaagatac atttacatag atgtttcctc cagtattgct tggaaaagcc |
| 104341 | aaaatcaaag tgatgtagat agttacctaa gagatgaata aaataaataa tggtacatct |
| 104401 | tttgtatgga atattacata gccactaaaa ataatggagc agaactctac tcaatgacat |
| 104461 | ataaaaatgt ccatgatata ttgtataatg gaaaaaaatt ttaaagcaaa aggttttacc |
| 104521 | ttatttattt cacaagctaa aaccctatat gattatacaa accaatgtgt ttgccttaaa |
| 104581 | aagataaaag tctggtgtcc tctaagacca taccacaaac agtgatcacc tctgggattg |
| 104641 | gaattttata gcagttgtgg gtagagagag tttgggagaa aacattcaca ttttatctca |
| 104701 | taattcttat atttttaaag cttttctatg agcattattt tgatacatat gtgagcagag |
| 104761 | atggtccctt ctaggtacca gttacaccat tgctaaacct cgtctgtttc ttccaaaggt |
| 104821 | gtcaggcagc gaacaagacc tgccccacca attacatgtg gaataatcac atctgcagat |
| 104881 | gcctggctca ggaagatttt atgttttcct cggatgctgg agatggtaag cagaatgatg |
| 104941 | ctttaaagac taaacgccag gggtctatat tgtgattaac atactctaat attaaaacca |
| 105001 | cacatataat attcatcatt cttctaaata agtgactaaa aaatagtaca ttttctactt |
| 105061 | cacgttggta ttattttgaa ctcctttata aaggaacata ctcatgtttg tacccaatcc |
| 105121 | tttgatggaa aacatacaaa aggaagatgc ttttaaaagc ttttgtttca tgccacaccc |
| 105181 | agaaccaagt aaggtatagt aaagattctc tgactatttg tctagactca acagatggat |
| 105241 | tccatgacat ctgtggacca aacaaggagc tggatgaaga gacctgtcag tgtgtctgca |
| 105301 | gagojgggct tojgcctgcc agctgtggac cccacaaaga actagacaga aactcatgcc |
| 105361 | agtgtgtctg taaaaacaaa ctcttcccca gccaatgtgg ggccaaccga gaatttgatg |
| 105421 | aaaacacatg ccagtgtgta tgtaaaagaa cctgccccag aaatcaaccc ctaaatcctg |
| 105481 | gaaaatgtgc ctgtgaatgt acagaaagtc cacagaaatg cttgttaaaa ggaaagaagt |
| 105541 | tccaccacca aacatgcagg taagagatcc tcatgaagaa tattaattta tcttactaga |
| 105601 | aatatgctct aaaccaaaag cagttttctt aaccaaagta acaattgctt gttagaatga |
| 105661 | ggccaataca ttctgaaaga caaaaatctt atattttttt aaccaatgct aaacttgcat |
| 105721 | gagactggat ttgcttccaa aaaagcaaga caggagcctt gaggatcaaa attagatcca |
| 105781 | agctcagaat atactctaaa ttagtggttc ctgtgggatg ttttcaaaat acctaaaggc |
| 105841 | aatccacttc acccccacca aaaagtagga tgccttcaga cataatttag gacaactgtt |
| 105901 | ctaaatgcag acaattttta tgcaaaactt acaaacaaag gacaggagag taccactggt |
| 105961 | atagaattat atctggaaat gaaaatacat agctaagtat ttgatagaat tagagaaata |
| 106021 | aatgaatatg ttgttaaagg tacccaagac tcatgtctta aacttggttt tgactcttct |
| 106081 | gcatcaagaa aaaaaaaatg aagttattcg actcaagcac attcagtgtt aatcccgaaa |
| 106141 | cctcttcctc tttaatctca gagaataaat tgatcctact atttaagcca gacctgtccg |
| 106201 | tttgacattt tctccacatt ccttcaacat tgcttcatgc cattccttct ttcttctgta |
| 106261 | acttgaacat cttcaactct actttttttc cccttagttt ataaaagttc ccaaatttct |
| 106321 | tctattttat tagcctctta ctgtgaagtt gagcaaactt tagcaaccca ggtctgttct |
| 106381 | cttcaaagct gctcaaaaac gaggcatttg ttttcacctc tttcacctac catgtattca |
| 106441 | accaactaaa acctggttta tggcctacag tgctatgtta aacctctgtt taacgtttca |
| 106501 | ttggcctcat agttgccaaa tccaacagag aattttgtcc ttaggtaacc tgtcctttcc |
| 106561 | atggcctttt tctttaagct cacctcttct atgacatgac attgtacttt cctagttgtc |
| 106621 | tacttaattt tcagaccatt tgtttttaat cactttcact ggattctctt tttacatcca |
| 106681 | ttctttacat atgggtagat aatgttcttt ttaacagaaa aaagcttgta tttcatttat |
| 106741 | ttactatctt cactaatgtt cattattatt tttccacagt atataacgag ttcatctttt |
| 106801 | tattctcaag agttttgtgt ccttatttta atgtatattt ttggtggttt tcctaaacta |
| 106861 | atattttagc tactggataa aaaggcttta gtggatctgg ctatctcatt gattatattt |
| 106921 | ttcttccctt atactgcaaa gtacatcata ggtataattt tattttgaga aagaactata |
| 106981 | ttccaatttt acctatatat tcctactgta ataaccaaga ggacatttca aaaatgtata |
| 107041 | tgctactatt ttcagaagga tatagatact aaatcttttt aagccttatt aaactatgtt |
| 107101 | ttatattgaa ttcttattga gtgaatttag tatacattga aaaatctgaa attcttatgt |
| 107161 | ctgcatacct acttttctac agaattatat gaacacagac aatatttcta tcattgcatt |
| 107221 | tctcctaata ctatacattc tttcaaaaag actctgttta ctgcaactca tcctagattc |
| 107281 | atttttctaa gtgtataatt ccaagctttg tgatataaat tggagcaaaa gagaaaatat |
| 107341 | catattttga aaatatatat tctcctcatt ctctcttaat atctattaca aagtgcagta |
| 107401 | ggcagagtat atattctttg gttcattgcc ttaattaaca gcttttatgg atcattaagt |
| 107461 | atcatatccc tttttagtag aggaatacca gtagtcataa ctatgaattt gcatttgcaa |
| 107521 | agtttaagaa aaattaacta gacatgcttt cttttctaga gccaaataaa tgaaatgtca |
| 107581 | aaaccaaatt gtgtagggtt ttttatagca cacttttgat ttccacctca ggtcatcttg |
| 107641 | cacttttccc tttacaccta ttcccacaca ttaggcatgc tcatactcca aaatgttttt |
| 107701 | aaaagatagc tccaattctc accaggcgtg gtggctcaca cctgtaatcc tagcactttg |
| 107761 | gaaggccaag gcgggcagat cacttgaggc caggagttca agaccagccc agccaacatg |
| 107821 | gcaaaaccct ggctctatga aaaatacaga aacttagcca ggcgtggcca cacatacctg |
| 107881 | taatcccagc tactojggag gctgagacac aagaatggct tgagcccagg aggcggaggt |
| 107941 | tgcagtaagc tgagattgcc ccactgcgct ccagcctggg cgacagaaca agactctgtc |
| 108001 | tcaaaaaatg aagcctcaat tcactggagc aacagggcag gagacacact gaccaattga |
| 108061 | taatttgtcc tctcaccgct actggaaact ggaagtctag gatgggagga aggggaccct |
| 108121 | cgctgctgag tattgtcctt ctcacctccc tgccccagaa tgcctctgtt tcacctggag |
| 108181 | ccaaggtgga aaggaagagt tagtcaccgt catgcagcca gctgccaagt agagacacaa |
| 108241 | gagtgagggt ggggctgctc actgaggacc acagttctgc caacatggct gggtttaatt |
| 108301 | gcctggaagt ctgggtccca tacaagtccc agactcatgt gaattctgcc atgcttatgt |
| 108361 | gatcacagta agtcagcaga ccttcagtgt tcactttcag aatttctgtt ttatgtttct |
| 108421 | ttcacccatg aagcaaagag cacttcaaag gaactaatgc ttacaatacc tcatccttcc |
| 108481 | atttgttata tcagcaagca agacttttat tttaaggctt ttccattcct cttaaatgtt |
| 108541 | gtaattctaa gcagaaacaa acttttttaa acctatgaac aatttcgtca taaaattagt |
| 108601 | aattttattc cagtctgaaa tttaaaaaca cagaaatacc ttggtagcat gatgaatcca |
| 108661 | ttgccttgat ctttaacgta agtgtgttct tgtttgttct cctagctgtt acagacggcc |
| 108721 | atgtacgaac cgccagaagg cttgtgagcc aggattttca tatagtgaag aagtgtgtcg |
| 108781 | ttgtgtccct tcatattgga aaagaccaca aatgagctaa gattgtactg ttttccagtt |
| 108841 | catcgatttt ctattatgga aaactgtgtt gccacagtag aactgtctgt gaacagagag |
| 108901 | acccttgtgg gtccatgcta acaaagacaa aagtotgtot ttcctgaacc atgtggataa |
| 108961 | ctttacagaa atggactgga gctcatctgc aaaaggcctc ttgtaaagac tggttttctg |
| 109021 | ccaatgacca aacagccaag attttcctct tgtgatttct ttaaaagaat gactatataa |
| 109081 | tttatttcca ctaaaaatat tgtttctgca ttcattttta tagcaacaac aattggtaaa |
| 109141 | actcactgtg atcaatattt ttatatcatg caaaatatgt ttaaaataaa atgaaaattg |
| 109201 | tattataagc tg |
| Human VEGF-D Gene (NCBI Accession No. NG_012509.1) | |
| (SEQ ID NO: 83) | |
| 1 | aagacacatg cttctgcaag cttccatgaa ggttgtgcaa aaaagtttca atccagagtt |
| 61 | gggttccagc tttctgtagc tgtaagcatt ggtggccaca ccacctcctt acaaagcaac |
| 121 | tagaacctgc ggcatacatt ggagagattt ttttaatttt ctggacatga agtaaattta |
| 181 | gagtgctttc taatttcagg tagaagacat gtccaccttc tgattatttt tggagaacat |
| 241 | tttgattttt ttcatctctc tctccccacc cctaagattg tgcaaaaaaa gcgtaccttg |
| 301 | cctaattgaa ataatttcat tggattttga tcagaactga ttatttggtt ttctgtgtga |
| 361 | agttttgagg tttcaaactt tccttctgga gaatgccttt tgaaacaatt ttctctagct |
| 421 | gcctgatgtc aactgcttag taatcagtgg atattgaaat attcaaaatg tacagagagt |
| 481 | gggtagtggt gaatgttttc atgatgttgt acgtccagct ggtgcagggc tccagtaatg |
| 541 | aacatggacc agtgaaggta ggtgagctca atttttaatg tgatgaagtt ctttttattg |
| 601 | gctcatacag aggactttct ttgccctcac tatttttgaa acaatataaa aatgcagaac |
| 661 | catcctagta gtggactgga caggatatat cctgcatttc ttggtgactg ttctgtttct |
| 721 | tagtcttatt aaacttctgg ccatgagtat ttgaaaatgc tggggtgggg gttggttgtt |
| 781 | ttttgaagtt atggtagaac atgagcagtc tggaatcttt ttggatggag aagtttctcc |
| 841 | toggttgcat atgcagatgg cacagtggtt ttttaatgaa acattgattt gtttttatga |
| 901 | ctgataactt tgtgggccat ttattttcag gtctttgtga gcagcagagg ttagtttatt |
| 961 | cgtttggtaa attgaaaatt gcagtgcttt ctatgaacat tttctatctg cttttgcaaa |
| 1021 | ttaccaattg ctgccatcca gaaaaatgtt ttctcagaga gtgtttggtt ttttcgcttc |
| 1081 | ttgaaaggtg taaaattcaa cactaatcaa atctttggtt ctgtgagcaa gcatcaaata |
| 1141 | gagcttaacg aacagagagt aatgcaaaaa attaaccaga atgttgctga ctgctggaac |
| 1201 | aatacttagc ccaattttat gcatttcatg gattatatat attttaagct tctattttga |
| 1261 | aaatgattcg gatgtaattg ttttgactga agtggtgcta aatcattatt gatttaggaa |
| 1321 | cttctggcct tgaaaagaca attaaatgtg agtttgagtt tttgtagctg ttgtttagga |
| 1381 | cgtgcatttt caacaggggt gatatcgccc ccagcagggg aaaattggtt cgtggaggga |
| 1441 | tgaaaaagtt ttaccctttt gatacatcac gcacagacgt acatacagta catatggtat |
| 1501 | gtagtttaaa atacgttata cattcaaatt gcataggggg aaagtgtctt caaaggctcc |
| 1561 | tggcbggtgt tggtggcctg gcgagggtgg gggctgatat ttaaaaatgt tgaacactga |
| 1621 | gctggaggtg agtgggaagt caccttgtct ggcagccagc acttttctaa cttctcaaat |
| 1681 | tccaaattta catgggagaa atcacagtgt ttggctccat tttactgcca ccagccttga |
| 1741 | tattggatct caaggccaga ttgtaggtaa atgggaatct gactgtaagc ataggtaaca |
| 1801 | ggagaaaacg gtctgacttg tttgaagcaa gtaagacttt tccgactgtc cagctttttc |
| 1861 | gtaagttcat gaaacagaaa tcctttagat gtgctgggct cctcgagttt taaaatattt |
| 1921 | ccattttcct tgtaaaacat cactttatct gatggtataa taaaggagac tgaattgttg |
| 1981 | gacataagtc atattcttta ggttgctcag ctctttcaaa gagcacaagc accaagaatg |
| 2041 | tctcaggtgt cctgggcact gtgaagtttt atttatttat ttatttattt atttgagacg |
| 2101 | gagtctcact ctgtcaccca ggctggagtg tagtgatgca atctcagctc gctgcaacct |
| 2161 | ctgcctccog ggttcaagtg attcccctgc ctcagcctct cgagtagctg gaattatagg |
| 2221 | cacgtgccac catgccgggc taattttttg tatttttagt agagacaggg tttcactgtg |
| 2281 | ttagccagga tggtctcgat ctcctgacct gatgatctgc ccgccttggc ctcccatagt |
| 2341 | gcbjggatta caggcgtgag ccaccgcgcc cggctggcac tgtgaagttt taaatgcttt |
| 2401 | gaatgtactg ttaatatata aatttgttga atggagtaac gaaggaaagc agctgaattt |
| 2461 | gcatgtgaca gaaaacaagt tgttacacgt ggaggatgca gcattatata cttactaata |
| 2521 | cgattagcaa ttttttttca gaatatatca gaatttcctt taaaaagtga agctacatat |
| 2581 | actgaactta tatccaccct acccctcgct caattaaatt atttctgata tgaaggaaag |
| 2641 | gattgcctat agctaaacag aagttttggc atagatatga ctgagtggta agggataatg |
| 2701 | agatatataa tattggttat agttttcttt tttccccaac ttttaagaaa agaaaatcta |
| 2761 | agaggaaata atgtttctaa atgttaaagt tcttcttgtt aaaattaaaa tgtagtgtga |
| 2821 | aaacatattc atggtggtaa tggtttaggg tggtggtatt tgaatttttt gttttttttt |
| 2881 | ttttactttt tgaaataaaa tgttttattt attataagaa attcatggtc ttcctcggta |
| 2941 | cttggtccat atgtatttct ttctcctcac cctcccctct tctaaccacc tcttttccag |
| 3001 | aatggatggt gatgccaatt ttgctcctag gttgtcctcc agccaccccc agcccagttt |
| 3061 | tcactttcta gctttgaaga ttgtccagtt ttccagctta gactagcatt gcctctacga |
| 3121 | tagttctagg tatctgtgaa gatttttttt tttcctgtag caatcatgaa atagctacta |
| 3181 | gtgctctgga cgattgtgct taatgccatt tgggtgtaag gcctcctaat ttcattagtc |
| 3241 | ttaccacttg bitttgcaag gatagctgtt tggagtcagc agtgcatgga acatgtgaac |
| 3301 | tgagacaaat ctgtttgaaa atctcaactt aagatttcaa atccactgtg tatactattt |
| 3361 | agcbgttaag tttctcagtc taagaagaac acgttttcct ctagaaataa gcttaaccca |
| 3421 | gtacctatgc atcgttcatt aatataatca gattacggcc tagatgtgga atttatttct |
| 3481 | gtttctattt tctccagctt tttaatacag ctcagacagt catatacagt tgtacacgat |
| 3541 | gtgcactgca caactctagg gtgctccatg catatagaca tatctgtatg tgacagccct |
| 3601 | aagtacaatg tggtagacac tctggacatt tggtaaataa gtatctacat cctcactctt |
| 3661 | ctctcattca cattggcctt ctggccagca ctatttctgg tttatttaat aaacaattct |
| 3721 | tgtcccccag aaattctgtg agtcttctga agatgccggg gaaagccagc cttcataaat |
| 3781 | cttttcaatg tcactaatga agacatgtca ctattgcaac aaaggaatac caggccatag |
| 3841 | taggctttca caactttttt ctgacagaat ttgtttcttt ctgctttatc ttccctgtgt |
| 3901 | actgtctttt tttatccacc ctctttctta attacactgg tagaagaata ttggtgggtg |
| 3961 | atggagtcat tcacattctg tgtaagacta gaatcagtcc aagatccaca ggaatgtggg |
| 4021 | atacttcttt catgagaagc cacatggctc acaagacttc tttacatttg tgttacttgc |
| 4081 | cttctcctga aattgtotct acagtgaatc aaataacaag gactgaggtg tattttccat |
| 4141 | atttaattcc aggaagcagt cccactcctt ctccctgccc gatttccagt tccaaagtca |
| 4201 | tgtacaggga agtccattga ctttgatgtt ggtcaaatgg cccagcaagc ttttgtccac |
| 4261 | ttttctgtca gacacagtcc ttggcacaaa agacatctga aatacttccc attaatttct |
| 4321 | tctttattta tgaccttgta gttaagtgtg ttgaattata tgcttctata cacatctgtt |
| 4381 | ttaatccagt tactcactta taactggtga ctgaaacttt tatatcacta tagcgtatta |
| 4441 | ttggtaccca ggatacaata gaatcctcaa tatcttacat cttcaatata gtacttcctt |
| 4501 | gtatgactta tttcttaaca taaaaatcct gttttagacc tgtggataaa cctttactat |
| 4561 | aaatcccaga gacaatttct ggaatgagaa tatagtattt gtccacacac atgattccat |
| 4621 | gtagaacttg aggtaataag atctgggact cccagataca tttattatta ccacaattgg |
| 4681 | atagaggtgc tacagaaata ggcacacaaa tgacagtaaa attgtttctg agaacatttc |
| 4741 | taggctcaac ttttttctac aacttaggat gaacagagag agtggaaact gtatataatt |
| 4801 | gggaatgtga ctgagatgag acaaagatga catggaagca tttcttcttc ccttgctttt |
| 4861 | ctggtggtaa gttcactctt ctgtcttcct tgccactagt tcttgcagtc cctaccaaga |
| 4921 | cactagggca ttatacagca aacacaccct gaggccccct gctactgcat catgaaagcc |
| 4981 | ttagctggtt gtgatgtcct agttcataaa gaatctgcct agtctctcat tagagctttc |
| 5041 | caatatttga caattcattc atttattttt ttcaacaggt atttattggg caccaatata |
| 5101 | tctaggcatt gatctagggg ctgggaatga agcaggaaat aagtctaggg gctgggaatg |
| 5161 | cagcaggaaa taagacaatg tttcaattct cttggaattt gcattccaag tgtgatgggt |
| 5221 | agaggcagac aatatgcaaa tgtgtaacat gtcaggtgtg ataaatgcta tgaagaaaat |
| 5281 | caagtagggg gagcggatac agtactgaat aaatcagagg agacctttct gattcagtta |
| 5341 | tgtctctaca gagtcctgaa ggtaataaga gagacagagg caaccatcag tgcagtggcc |
| 5401 | atggtgggcg cagcaagttg gcttcgatgt ctgggtatta gccagggagc cggtgcagct |
| 5461 | ggaggtgggg tgagtggagg ccagaagtgc agttgttgag gttggagaag tagccagaga |
| 5521 | agatcatgta aggtgtgact gtgctcccat aaaactttat ggacactaaa aattgaattt |
| 5581 | tatgtaattt tcctgcatca tgaaattaaa aaaaaaattg tttcaaccat tggaaaatgt |
| 5641 | aaaaaattgt tcttagctaa caggccatac aaaaacaggc tgcaggttag atttggccca |
| 5701 | tgggtcatag tttggcaatt gtgttatata taaattatta cactgtttta tcttcatcat |
| 5761 | ggtacacatc catacctgac atgttttatt tgcctgtgta tacatttatt gctttgtcac |
| 5821 | cgtctactag aatacaagtt ttttgagaaa aggagctctt aattgtcttg tttactgcag |
| 5881 | catcccaatc accagtgaaa agcctgtatg taatagagta gatactaaaa acagtatttg |
| 5941 | ttgactgatt gatggactag acctcaggat ttttagatac ccaggatcag gatatgaact |
| 6001 | actgcattaa atcatctcca acatctactc tcatgatggc ttgtctgact tcatgattta |
| 6061 | aaaaaaattc taaagcattt ttaaggcagt atattcaccc tgtgctattt tcctgtgggc |
| 6121 | ataggatagg gtttgtgtgg atgtatcaaa gacttctcca ctgtccttcc aggcacaagc |
| 6181 | catcctataa ggcgttccct tttaggagcc agaggtatag aaggaagtca tctgagccca |
| 6241 | ttattccagc ctgttggtaa cagaaagaga gatgagcaaa gtagcatttg gctgcacagg |
| 6301 | ggtctggaca aaacttcaac atcttgatgt tttccttcat ccctgagagc cttagaaatg |
| 6361 | ctacctatgc tttcatttta bittaggttg tttgtaaaat catggtaaat tatggcaaaa |
| 6421 | tactctggtc agatacttta tcaggttagg ccaggatatg ctgtgaaaac aaacaccccc |
| 6481 | gaaatcttgg tggttcataa acaacagaga cttatttatt gcttatacca catgaccagc |
| 6541 | ctggttcatc tggggtcaaa tccacatggg gatgaagctg gctgagtatc cgatcttgaa |
| 6601 | tgttaggaat cactatgaca gagggaggga gagcctgaga gcgcctcacc ctggcactta |
| 6661 | aattctctgg cccagaagtg acacatatta cttctagttg cagccccttg acccactgcc |
| 6721 | ccatctagcc acaaagggcc aggaagtgca atcccaccat gcgctcagaa ggcagagaga |
| 6781 | tggaaatatt tgacaaaccg tattaatgac tgtgacacat ggtgagttct tcacattggt |
| 6841 | gacttctaag tgcttctgaa cacacctttg actgtagaat gtcaaaaaca ttctcaattt |
| 6901 | tacagcagtg ctggaaaatg aattgtattg agacaacttg ggaggagtag aaggagatgg |
| 6961 | aataaaaaaa attcactgat ttctgtcatg tgtcatgcct cctttaatgc acggaagaac |
| 7021 | gtatactttg cttaggaaat cacattacca cattcagaac aactttagtg aagatgggaa |
| 7081 | acaaccatgg ctggtcaatg gggtaacgtg tgctgaagga agacaggttt atttctcagg |
| 7141 | aggcatcttc tccctgggaa aaggaaagac acatattcat ctcagtaaat atttgtggaa |
| 7201 | tgtctaccat gtgccaggca tatgagtgga aatgatgttt ttataaaata aagatgtctt |
| 7261 | aagtatttgc atgtcttact aacagtcagg gagttcaact tggccagtgg gaaggataat |
| 7321 | tttatgcctg aaactttagt aatgtaaatt tttatgctga ttctcttttt gtcattcact |
| 7381 | gagtattcct aagtaactat aacactcaca tattggagat aagtattggt ttcctgaaat |
| 7441 | ctaggtttgg ctaacattgc ttctggaaag agaaaataac abitgttgaa tgtccctatg |
| 7501 | gcaaattctt gctgttactt actgttccat tatggagagt gttagaaaga gtgtaatttt |
| 7561 | gattgaatga atatgctaaa aaaaacaccc taaataagaa actcacaaaa agaacagagt |
| 7621 | ggaatgaaaa agtgaaaaca actttgcaat ggtgtgcttc gtttataagt acattgtcac |
| 7681 | agcaagacta gggatgattg ggcatcttag agagtgcaga ggatgttgat aaggaagagg |
| 7741 | aagaggagat aagtggattt tgatatggga cactagatcc ttagggaaga aatgtgaaag |
| 7801 | agggtattct gggctgactg ccgctggcat agcaaggctg ctttgtagaa gggacaataa |
| 7861 | agttttgcat aaggatcctt tttcccatcc aatggattat gctatacttt agctggaata |
| 7921 | gggctgtagc agttagctat tgccacaata atgctgtgta acaaagcagt ccaaatttca |
| 7981 | gtggcttaaa acatcactac cttattctca cttatgtctc caagtcagct gggagtcaga |
| 8041 | ggattaaggc tcaaggctta ggtttggtgc aggtcagccc caggtgtctc tcatcctcct |
| 8101 | ttgatcagtg ggctagcagg agcatgtgct tgcaatgatg gtggaaatag aaaaacgtgc |
| 8161 | aatcatatgt gagtttcaag cctctccttg catcatgtct tgtaatgtcc tattggtcag |
| 8221 | tagggcbjgg aaatatatcc ctccctcaga gagtcaggag tggaaatgaa aatgttttta |
| 8281 | acaatagcct aatcaccata aaggctttgg gtggcacact gggcccttga tcttggagat |
| 8341 | cagtgataga ctgtaacaga cctcagaaac cccttggggt tattcagagc atacttctag |
| 8401 | agggtctggg gttgtcttgc cattcaagcc catcccacac ccatctgccc ccacatatcc |
| 8461 | taagcacagt tatgtcaagt gagaacagag gcatttgagt ggagcacaga tttcaaacac |
| 8521 | ataaaggcag ggcatggcca tctcccgcag tgctagatga tctggcbggg agaaaaccac |
| 8581 | aagcagtctt catcaaattg gaggatgtgg aggtcccagg catttagtcc cctagtatgt |
| 8641 | ccttaaaaaa cccagacagc catgcacaca cactcacaca aatgcacacg cacacacaca |
| 8701 | tacattcaca cacacactct tttcctgcat ttgtagttcc tttcctcagt ctaagtttaa |
| 8761 | ttaaacaact tggatttcat atatattcat ttaaatatag aattgcataa agaaaagagc |
| 8821 | caccagaacc accaatggta gcatgaggcc tctgaaatga aagatgagcc caccccaacc |
| 8881 | ttaaatggcc aggtttctgg atttcagaga agcaagatca gacccttggc aggttccatc |
| 8941 | tgagcagcca cagcagccat agctacagca ataattatta gcaagtgtgc gttctccctg |
| 9001 | ccctagttag tacaccctat accatcaggt gtcatctgtt ctagttaaag tcagaccgta |
| 9061 | ataacaaaac atcaaaatgt aaaatgtggg ttgttttttt ctttacacac ttctaaagac |
| 9121 | atttaaagcc tgagcagata ccttaaaatt catcttctat ctgaaaatac ctcctagaac |
| 9181 | cattttaaaa aggagatgga ggcaaggtgg agagaaaaag tttgtctttg gttgacactg |
| 9241 | ggaaagttgt cttttaaaaa attttttaat gtttatttac tatggagttg ccgtgtcttg |
| 9301 | ctcttttcaa gctcacctgt cojgcttcta aggaatatca ggggccctaa aacacagact |
| 9361 | tctaaacccc aacacatagg acacacctaa gtgtggaaag aaaggaaaga ggcaggaaag |
| 9421 | aaaggaaaga ggaaggaaag aaaggaatgc aacatttatt gtgtgcctac catatacctg |
| 9481 | accctttcct acatatgacc acatatgatc tcttcatgag ctttatgagg tgacctatta |
| 9541 | ttaacaatgc tgctttataa atgaggaaac caagccttaa ggaagtcaaa taccatatcc |
| 9601 | tcagtcaaat agctaaaaaa aaaaaaagaa aagaaaaaga aaaggtagtg cctggattca |
| 9661 | aagacagctt atttttttaa cttatagagt aaaatggatt ttttcccttt tggtgtgtag |
| 9721 | ttctatgaat tctaacacat gtatagattt atataaccac aaccataatt aggatacgga |
| 9781 | actattccat caccccccaa aaattcactt acgttatcct tttacagtca gaccttcctc |
| 9841 | ccagcctccc aacctctggc aatcactgat ctgttctcct tcactgtcgt tttgtatttt |
| 9901 | tggttcgctg tcattttggt tttttgggaa tgtcatataa atggaatcat acagtatgta |
| 9961 | gcagtttgag attggcttct ttcactcata ctgcctttga gattctacca gtgtcccagt |
| 10021 | agttcattcc tttttattgc tgagtagtat tacatcgatt gctgaaccgt tcacccattg |
| 10081 | aatgacacat aagttgtttc tagttttttg gctattgtga ataaagctac tacaaacatt |
| 10141 | catgtacatg tatttatgtg aacataaggc ttcatttatc aagggtaaaa tccccagaag |
| 10201 | taggactgtt gggtcatatg gtgagcatat gtttataaga aactgcaaac acattttcca |
| 10261 | gagtgttata ccattcaaag ccagttttga acaattcaaa tctatgcttt ttctttccag |
| 10321 | taagcbgttt ctccagacga cagagtggtt tactatatta ggcaaagctt catcttgggg |
| 10381 | aatgttattt ccaactgaga gctatgggag gcaaagtcac aaaccttcag ctcagactca |
| 10441 | ccaatctaac ttgatctggg aagatacctc gacaggtggg ggagggagaa catctgctga |
| 10501 | ggaaggccgg gagtggagtg agacattgct acttggaccc caaaaccagg aaaaatttgg |
| 10561 | tggttttggt tgagcttgaa ccatcaggtt aaacaggaaa tgcaaaatgc tcttccagtg |
| 10621 | aaacagaaga agctgctaag aggtagaggg aacatggaac tatttgtatt gcaaccgaat |
| 10681 | ccacctcccc aaacccactg caaagggaaa ttgctgactg caatgtccct gaactccagg |
| 10741 | gtgagtaaga agagaaccac gccccccagg gaacacttgt aaatttttaa gcaaatctag |
| 10801 | ggaaagttgt gtaaaatgtg tcccttccat aactcaccct aaagcttctg ggtattctaa |
| 10861 | atatacaaat tctattcatc acaccgtttt atcaccaagc ttcctgaagg catattgcca |
| 10921 | acacaatttg acaaagaaaa tagcaccaac agotttttaa agccttggaa ggatagtctc |
| 10981 | agacccatgg ctctctagag gtccagggat gaatctagca aagctggcct ccttttccat |
| 11041 | atatatagaa caagaggatt gttaatagca tgggattgga atggctcaag aaaagctttt |
| 11101 | tgaagctctt tgagaaaagt agccagggtc cccccttaaa ccttctttgc tgatggcctt |
| 11161 | acagctcaaa accagcattg gaaccggcta ggtactccca aaccaaagcc tcttccactt |
| 11221 | ggcatgtata tttatattct catatcttct ttcaaatacc tttcagtgtt gccttttgaa |
| 11281 | aagattataa tttgtacttt tttgttgaat tcagtaggtt aaagcagtac ctattatctt |
| 11341 | taattttatt ttgaaaaatt ggttggtttg gcttttgggg aatttgagag gcaatttagt |
| 11401 | ctgtcattta ggatggcatc atataaggca gccaacttca tcatgctatt tagcctgaaa |
| 11461 | agcgatattg ttgatcttca accttgaaaa agtcgtacag gttgggagct gacctgcaaa |
| 11521 | tggtcaggta tcttgagata ggaaaaggat ttacaaatcc aggtcagcaa gatactcata |
| 11581 | caaatatttt gaacccaagg tatacatcaa atagatttaa agactaagac tatttctgag |
| 11641 | catgcatcga ctgtttgaag actagtggac ttgtatgaag ttcaggagtt aacctgggtc |
| 11701 | ttgtaactta aaaacagcat ttctcatgcc ctaaattagt agtagagaga caatatagag |
| 11761 | agttcctata tagccctcac ctatcttcct ctaaggctaa cacctgggaa gttttttttt |
| 11821 | aaaaaatcct gatggcaaag ctgcagccca gacccaaaaa atgagaatct gtgagattta |
| 11881 | agattcgagc atcagtattt ctttgaagct tattcccagg tagattcaag aagaagccaa |
| 11941 | gattttgaat gcctgcttta ttattttttt ttttgtgaga gctttaatgg cacaaaatgt |
| 12001 | ttatagctac aagttataca tgtattgtaa attgtatata acgatacaaa gtgctaacta |
| 12061 | aatagatgga gaacgcataa ccactttggc tcagttaatc caataatttc cacaatgggt |
| 12121 | tcatgaaaaa cctcatctga ctggctaagt cttcaattct cattttttta gaatagtaaa |
| 12181 | tatttttact gcaatcacag gaacttgttg cgctttccaa tgtgcaagtt tctgcagttt |
| 12241 | tgctcttgat tctatttaca aatatcttaa gccagttttc atcaaacata tgaaaaatga |
| 12301 | agcctgcctt tttgtcccca aattgtaaat aggtgtaaat ctttttaagc atcaatctca |
| 12361 | caatttcaac agttaattgt tgaattctcc tttccaatac acgatgtttt cgttcaacac |
| 12421 | aaatctgggt agtagtaaaa tgttcatccc gtgtgttagg gctacagata catactacgt |
| 12481 | gctctcataa taaattttac tgttatgatg tattcatttt ttaagtaatt ttccataatt |
| 12541 | tcactgatgc tttaagaaaa agagcaacac tatgtttctt tttaacgttg aaagaaatca |
| 12601 | taaatatacc caggttcaat ggcgctactg atagaactgc tgctgaattt ggaatgagca |
| 12661 | caatgcacta gctgtaagaa gtcagttttg ggtaatgaat aattttactt ttccctcctg |
| 12721 | taataccaat ttcatactgt agcagtttat ctagtcagtt ctcctaactt tctgtccttt |
| 12781 | ccaattttat tcaggctttt caaaaatcag tgagccatca gatttacttt cttcccaaag |
| 12841 | aaattcaaat atgaatgctt gaaataaata ggttatagaa ggcaaatcaa gtgttatcag |
| 12901 | gtttaagatt aagacagaaa catggtctaa taaaaagatg tccaaaatta tctagacatc |
| 12961 | aaatgctaga aagaaaaaag aaaattactt gcaaaactat ttaggatata tcatctttct |
| 13021 | taaagattgc cagctatatt cttgaaaaaa agataaaaat tttcttgttt aacctgcatg |
| 13081 | ttattttcca ctataacatt aattttacaa atgttgatgt gagagagaag agttagatag |
| 13141 | tttctgcaaa ctggcaaacc tggctgtgat agtgttttta ttcaagttaa cctggtgcac |
| 13201 | tttatagatt gctagottta aaattaacag tgtgaacccc tgotttaaac ccttctcaaa |
| 13261 | gtgcagtcag ccaatcaaca gtattgccat cacctgggaa cttgttagac cccactttgt |
| 13321 | caaactcatt tcctggtatg acaatgaatc tggctacagc aacagggtgg tggacctcat |
| 13381 | ggtccacatg gcctccaagg agtaacaccc caggaccatc agccccagtg agagcacgag |
| 13441 | agaaagagag aggccctcag ctgcttggga atccctgcca cgctcagtcc ccaccacact |
| 13501 | gaggatctcc tctcctcaca atttccatgc agaccccctg aagagggaag ggcctaggga |
| 13561 | gccccacttt gtcatgtacc accaataaag ttccctgtac tcagccaaaa aaaaaagaaa |
| 13621 | gaaagaaaaa agaaaaagaa atgcagcatc ctgtcttgcc ccaaacccac tgcgtcagaa |
| 13681 | tctgcatttt aacaagatcc ccaggtatgc acattaagtt ttgagaggca gtactacata |
| 13741 | taaaatatgc aacagaccac acaaacctgg gcccaattgc tatttgtcag atacatgtat |
| 13801 | gtatttatta cttataaatt ccttcatcag atatgtatta cgtgcttatt actttaaaaa |
| 13861 | gatgaatctg acacatatcc taccctcaaa gagatctcag tctaggaagg gaaatacaat |
| 13921 | gtgttcataa ataatatagt ctaagttagg gacttcataa aatgcttgat ggaagaagtg |
| 13981 | gcatttattt tggacctgga atgagaactg aaagaagata ttcaaaagac aagtgatgta |
| 14041 | gtgatgtagt tttgaataca cgaataatct cagggttact ttttctatag cttttggtga |
| 14101 | atcaagttgt ttattcatac atttaataaa tatttattca gctcttacta ttgctataag |
| 14161 | acagatacca ttactgctca ggtggttttt acaacctagt ggggaagaca agcagataac |
| 14221 | aagaaatgac acaattcatt agtgttactg gtagcgttgt gaaggacaag gatggggtgc |
| 14281 | tagaaatcca tgtgacggac cagacctagg caggggtggg agttatggag gaggtttccc |
| 14341 | tgagtaggta acatctaagc tgagaaagat ttagttagac aaagagtgaa tggcattcca |
| 14401 | ggcaaaggaa acagcatgga ctaaggtcaa aacaagaaga aatgaacgaa agagcaagtt |
| 14461 | gataaaatgg atgtccaata atattccatt gttcaactat gcaacatttt tcattgcctc |
| 14521 | ccaaattgga tcaaagtagc ctggtcttca tgcctccagt ccttcctctt tttaaaaatt |
| 14581 | ttatacaact atattaatat agaatttaca tactataaaa tttcattcaa gtatattagg |
| 14641 | aaatttactg agttgtatag ctatcatcca tataaggtcc gttatgtccc tttgcaatga |
| 14701 | accctccatt ctcactccca gcctcaggca gccaataatc tattttctgt ctctaggggc |
| 14761 | tggaaactta ggattggaat tagttggttg tataataaat ttagcttatt agagaactgc |
| 14821 | tgaactcttt tccaaagcaa caatacaatt ttacagtttc atcagccttg tgtgagggtt |
| 14881 | cctgttgctc catatccatt acaacacttg gtattgtcag tccttttgtt tatagccatt |
| 14941 | ctactgggtg tgaagtggta tctcatttca ccagcccctc ttcctaactt atttgccaga |
| 15001 | ttccccactt ctaaacttgc tctatgccca accaaagtga accccttgct gttttttttt |
| 15061 | tcccctgagg ctcgttgata tccccaaatt atgcctttct tcattctttg aatgtgttac |
| 15121 | ttgactggat atgtattttt ggtgaaggag aggggctgga aattgagaga tgaaattggt |
| 15181 | aggagtacag aaggccgttg acttcctcac aacgtgggac acttccaagt ttctcctaca |
| 15241 | aaccccacca ctataccttt ccaaatatct tgcctgccat cttggtcacc cgtgacctaa |
| 15301 | attaatactt aggaagctat ggagatgctc atgcttcctc aggggagaat gctgtgtgaa |
| 15361 | cttagaaatt agcaaaaggg gaaatgacta cccttgaaat tgtaccacag aaaggagcat |
| 15421 | acattcaaat gatggtgaag tcttattaaa aagactttaa gcctcccaat ttagaagctg |
| 15481 | gottgtggta gccaagaaat tagagaatga tttgttattt aagagtgaaa ttgctagtag |
| 15541 | tcttgaatta attaccataa aaaagctgcc gctgtaataa aaagcagaga tctggtaacc |
| 15601 | ctgcttcatt cactttcttc ctcttgatga aaacctttta attattttga ttttgattag |
| 15661 | cacttccatc agaaaatagg aagaaattag gagcaattta cttggcaaag gtttagtaat |
| 15721 | taaaaccact gaaatcaatg gtttaagtat gtatttggga taaacacatt tttaattgtt |
| 15781 | atttttgtct tacccaagtg gataacataa agttcattat acaaaaatca accagtgcag |
| 15841 | aaagccgatt gggaacaaac aaccattctt gaaccctttg aaaatgtatg cccttgatga |
| 15901 | attacttgtc aggtttctac ttaagtttaa ttgttagtac ttccacttaa aatagcaaaa |
| 15961 | tgactgtctg caatttctgt tatttcaaac taggttttaa attctggggt tgaaagtaag |
| 16021 | cttaaataac tctgagtact tgagtaaaca ctgcattttt tatgatgagg caagttgtat |
| 16081 | gagccattta attactttaa ttcaatccag agatttgata ttttctcctg agttctcaca |
| 16141 | gttggatagt ttaaaaatat ttctaagatt gaattgaatc ctgtaagaac tataataaaa |
| 16201 | ccatacatct gcctgttttc tttctttctc tttctctcct ttcttttctt tctttctttc |
| 16261 | tctttctctc ctttctttct ttctctttct ctcctttctt tctttccttc ttttctttct |
| 16321 | ttctttcttt tctttctttc tttctttctt tcctttcttt cttctttctt tctttcttct |
| 16381 | ttcctttctt tctttctttc tttctttctt tctttctttc tttctttttc tttttctttc |
| 16441 | tttctttctt tctttctttt tcaagatcgt gctccattgc ccaggctgga gtgcaagtgg |
| 16501 | cgagatcatg gctcactgca accttgacct ccccaggctc aggtgattct cccacctcag |
| 16561 | tctcctgagt agcbjggagt acaggcatgc accagcatgt ctggctaatt tttgtatttt |
| 16621 | tagtagagac agggtctcac catgtttcca gtctgatctt gaactcttgg gctcaggcaa |
| 16681 | tcctcccacc tojgcttccc aaagtgctgg gattacaagt gtaagccacc atgcctggcc |
| 16741 | ttgtattttt ggataatatt gagtgaaatt tgcctcaata cataaaaatc ctttcaatat |
| 16801 | gcttcaactc taaaatcttt aaaaagctgc ttggtttcat tattttcacg tggaagcagc |
| 16861 | attgtcacaa agttttattt tgaagactga attgtatatg gagtactgtc caactagaag |
| 16921 | agaatgaata atcaggaaaa gagagactat tgacaaataa gacttaatgg agaagcattg |
| 16981 | aatttcaaag ctgccagaga cattagcaat tgttcagttt catctccaga tttcttagat |
| 17041 | gaagaagctg tggcaagcca atttcacaaa cccgatctat gatcctcatg ctccccactc |
| 17101 | ctctcactcc cacaattttg ccttgattca aactttatcg aaaagtgaga aatcacaggt |
| 17161 | atgagctcac tgagcttccc aggcagtctt gccatctaca aacccatgtc attctgtatt |
| 17221 | ttcctcttgt ttctgacagt gatcctctca tctagtcaca ctacatccac ttatctctgg |
| 17281 | cacttatgtc aaaacaaccc ctctaggtcc tgccttagct ctcctgcata tgctttttct |
| 17341 | ttcttcctgt ctgttgcctc tttcccccag cttataattc tcccgctttt attaaaaaca |
| 17401 | tgcacccaca gacacacact cacatctgga ttcccaagtg cgataacctt gtagattcat |
| 17461 | attttcagat cgttcttagt ccacagaata taaaattgat tgaatgatgg caaacatctg |
| 17521 | cagatgacaa tcatttacag aaatggcact aaagccatga agctgaagct gcaggactta |
| 17581 | tggatctggg ctagaagaca ggggccatca aaaatttagc ttcagttgga aatcggctct |
| 17641 | tttagtgcac tacatcagat ccatgaaaga ggaaggaaga gttactgctc attgctgcct |
| 17701 | ggagctgtga cttctatgaa attacttaac ggggcaaagg aggaagcaga tacttccttg |
| 17761 | caactaggac gtgagctgag ctgatocctg aatcataaat actcaacaag attcggattc |
| 17821 | aggacccagg gtattatggg gtacaaccat aaaacttcta aatgttggag aaagaataat |
| 17881 | gagaaagaaa aatgaatctc tgaatgaaaa tggaactact aaccaaaatt ccaaatcacg |
| 17941 | ttaatataat tattactaag aatgacagca acaaaatgaa taatcagtat atgtcatacc |
| 18001 | tataaagtta aaatctaaaa taatttgaag aaatacttaa aaatatttgc aaccctcaaa |
| 18061 | gagataaaga aataatattc ataaaattga aatgacaaac taggggcagg gcgcagtggc |
| 18121 | tcacgcctgt aatcccagca ctgtgggagg ccgaggtggg tggatcacaa agtcaggaga |
| 18181 | tcgagaccat cctggctaac acggtgaaac cctgtctcta ataaaaatac aaaaacaaaa |
| 18241 | ttagccgggc gtggtggtgg gcgcctgtag tcccagctac tcaggaggct gaggagggag |
| 18301 | aatggcgtga acccgggagg tggagcttgc agtgagccga gatcgcgcca ctgcactcta |
| 18361 | gcctgggcaa cagaatgaga ctgggtctca aaacaaacaa acaaacaaac aaacaaacta |
| 18421 | ggaagaatat acagaaatgt aacagaaagt agataggaag aagaatgaag tagaaatgct |
| 18481 | tgaaattaga aatacggtga ttgaaattaa aaccttaaca aagtaaactc tagactcaca |
| 18541 | acaattggag agttggtgat tggaaagatg aaccaattaa tttacccata acacattaga |
| 18601 | gagaggtgaa gaggaaaaaa tagctaaata taaaagcaca tttaagagac atgtaagatg |
| 18661 | attaaaagcc tccaacattt ttcaaaaaag agagtagagg caatattata ggtggaataa |
| 18721 | tgaaaatgat aatggctgag aatattaaag aattgagaat aaaaaagaca agtggcctca |
| 18781 | gattgaaact gccatgaagg tctctgtctc aaattctcaa ctctgctttt gtagtatgaa |
| 18841 | agcagccgta gacaataagt aaatgaatgg acatggctgt gtgtcaatac aacttgattt |
| 18901 | acaaaaacag gcaggcagca ggctaaatta ggcbgggagg tcatagtttg acagctcttg |
| 18961 | atctaaagaa taaccattgt tggccaggcg cagcggctca tgtctgtaat cacaacactt |
| 19021 | tgggcggcca aggcgagcag atcacttgag cccaggagtt caagaccagc ctgcgcaaca |
| 19081 | tggcgaaacc ccatctctac taaaagtaca aaaattagcc gggcatggtg gcaggctcct |
| 19141 | gtagtcccag ctacttagga ggctgaggca ggagaatcgc ttgaacctgg gaggctgagg |
| 19201 | ttgcagtgag cggagatggt gccactgcac tccagcctgg atgacagagc cagactcggt |
| 19261 | ctcgaaaata aataaagaat aacctttgtt tacattttca tgtatatgtc tccagatgtt |
| 19321 | cctcatatat ccatataagt atgtatatat gatgtacata agtgcataag taaaaataca |
| 19381 | taagtaattt taaaagaggt tatatcatag ctgaatcaca catgacttag accacacttg |
| 19441 | ctcttctgag tacccatttt tggacaactc tcagtgtcca ctagcatgtc taaaaaaaat |
| 19501 | ttctcctcct aaaatgctaa tgcatgatgt agattttaac tacagctttt gaggctcagt |
| 19561 | ggaggagagt gtacatcaca ctacccaatg caaagccttt taacagcccc ttttgctcat |
| 19621 | ctttgttttc cttcactgtt cctcgccctg cagcaggcag ctgacattca cctttccctt |
| 19681 | ccaccctcct ctctcagcac tggtcctttg cctcctccct catcccagct ctacaaatgg |
| 19741 | cctcagcctg catattccaa ccacccagca aaacaaacat ctagtaacta ccgggtcagc |
| 19801 | aagagaaaat cggaggccct agccatagat agatcacctt atcatttctc cagcacattc |
| 19861 | caggaaggat ctcaattcgt tctgtcccaa tatacctcta catcctttgt tttgatgatc |
| 19921 | acatagaatt cattgtatgc atatatcatt atttatataa ctaagccccc aattttgaac |
| 19981 | aagaggctac atactgaaaa tcttttatct accaagtctt ttttttctta caaacccatc |
| 20041 | caatacagtt gcactgtatc cgccaataca gttcatgcaa ctgtatggaa agcaaactct |
| 20101 | agaagagtat ttgatagctc cataagaata ttaaactctt atacttctag agcgtaaaac |
| 20161 | cccagaaaag tattttgtca gaaaaaaatc atgtttttga aatagtaggt tttaaaagaa |
| 20221 | aacaaagaga gttagaagta agaaaattca ggttatcagg ggcttgatat cttttttttg |
| 20281 | tgactgtagt caggttaccc aggcctttgt ggatcaattt ctcaaacaaa taacagagat |
| 20341 | gaaaacaact gtcagtagct actgtcacaa aaataatatg ataaacatct tttcgtttcc |
| 20401 | tatggctgcc ataactaatt atcacaaact tggtggctta aaataacaga aatgtatttt |
| 20461 | ctcacagctc cagagtccag aattccaaaa tggaagggtc agcaaggctg cacgccctca |
| 20521 | aaacactctt ggagagaatc ttttcttgct tcatccagct tctgatggct ctaggcaatc |
| 20581 | ccccgcttgt cactgcatca ctcoggtctc tgcccccatc ttcaaatgac cttcctctgt |
| 20641 | gtccctgtct tctcttctgt ctcttataag gacacttgtc attgtacagt atttagggtc |
| 20701 | cacatagata atccaggagg atctcatttt aagatcctta acttcattac atctgtacag |
| 20761 | atcctttgtc caaattaagg taatgttcac aggttctgtg ggttaggatg tggacatatc |
| 20821 | attttgaggc ccaccattca atgcactaca attttctttg taagtgttct gagaacccag |
| 20881 | gaagaataag taaatcctct gattcaatca aaaatgagca gaatgtaaac caaaaatact |
| 20941 | agaagatatc ctttttccta ggcactggca tacgtttcaa tagtatctct aattacagat |
| 21001 | gtatttacac ttctaagtgt cagaaatgaa gattattatg acaaatttaa aatttagtaa |
| 21061 | cttgttttta aactggtatt tttgtttttt taagcgatca tctcagtcca cattggaacg |
| 21121 | atctgaacag cagatcaggg ctgcttctag tttggaggaa ctacttcgaa ttactcactc |
| 21181 | tgaggactgg aagcbgtgga gatgcaggct gaggctcaaa agttttacca gtatggactc |
| 21241 | tcgctcagca tcccatcggt ccactaggtt tgcggcaact ttctatgaca ttgaaacact |
| 21301 | aaaaggtagg tgtgtggatg tggagacaaa ttctttctct ttattagata gtgacaaaca |
| 21361 | cacttacttt ctccaaaagt ctgcgtaggg cagacacgtg tcagagggag aatgaaagtc |
| 21421 | ggtctttgat ttccagtatt agtgcagaat cttgattttt taatgtttac ttcacagaga |
| 21481 | aatatattca atatgatttt gagataaaaa acacaaaaga acatctcaaa atatagaaat |
| 21541 | aaatttaact caaggatgtg ggggcaaaga aaacccagga agactattgt tctcaataga |
| 21601 | aaaacaatca tcaggtttac ttagaaaata aaacctgggg attcatccac aaggagtatt |
| 21661 | ctactgccat acatacatag acaaaaacca aagatggcca ggcatggtgg ctcatgcctg |
| 21721 | taatcccagc actttgggag gccaagaacg gcagatcgct tgagcccagg agtttgaaac |
| 21781 | cagcctgggc aacatgacga gaccccatct ctacaaaaaa atagaaaaaa atagctgaac |
| 21841 | attgtggtac gtgcctgtat tcccagctac ttgggaggct gaggtgggag gatcggctga |
| 21901 | gcccaggagg tcgaggctgc agtgagccat gatcatgcta ctgcactcca gcctgggcaa |
| 21961 | cagagcaaga tcctgtctca aaaaaaccac cccctccccg aaccaataga ttaggtatag |
| 22021 | cttttttttt tatttctgca aagttgtgtg attttttagt aaaagtgaaa agtaaaagtt |
| 22081 | agacactgag ttgtaatatt gggtactggt attgctagga gaataatgaa gggagaaaat |
| 22141 | tctcaagaca aaatgatcaa aactccagac tagaaaataa cataatttga aataaggata |
| 22201 | atgatcgttc cctagtaacg tatgaagatt ctttaaaaga aaatcaggcc aggtgtggtg |
| 22261 | gatgacacct gtaatcccag cactttggga ggttgaggca ggtggatcac ctgaggtcag |
| 22321 | gagttcgaga ccagcctgac caacatggtg aaaacccatc tctactaaaa atacaaaatt |
| 22381 | agccaggcat ggcggtgcat gcctgtaatc ccaactactt gggaggctga ggcaggagaa |
| 22441 | tcacttgaac ccaggaggcg gaggttgcag tgagccaaga ttgcaccatt gcactccaac |
| 22501 | ctgggcaaca agagtgaaac tccatcttaa aaaacaaaaa aacaaaacaa aacaaaacaa |
| 22561 | aaaaacaaag aaagaaagaa agaaaaccag tgtgagtagg tactgtcata atgaataaaa |
| 22621 | tgcttgtcaa gtaaagttct gtggtttctg attaggcact taattttttg atgtcatgtc |
| 22681 | aaaacaacac aagaagctgc tacagcattg ctgatctagc attctagatt tgattaacat |
| 22741 | gattacctgg taactgacta tatatatagc ataattcaaa ttaaccacta ggccaaaact |
| 22801 | atttttttct ttctacctaa aattgtattt gttttttccc atttgtaaaa agatgttggg |
| 22861 | gttgcacaga cctctgttgt tggcbgtggg gagagctgtg catagatggg gacatattct |
| 22921 | ttggtagcac cttgggcatg agtgtgaaga ggattcttag tgttcatgtg tatgactgtg |
| 22981 | tgtctaagtg agttgatgtg gtaggaacca tagcctcgag ctcacttcag acagaaattt |
| 23041 | gaagctctag atgtttctat gtggtgaatt aatatagcct tcatgagaac aaagggttgg |
| 23101 | cacctcatct agaggtcaaa ggccttaacc agattacctg actgaaggcc tgaggtgaac |
| 23161 | ctggagctat ttcatgaaca tgaacgttac cataaaacca agactaggtg atctaaaaaa |
| 23221 | agtcaatgac attgacattt tctaaggaga aaaccattaa aatatcacgg aatttgcaaa |
| 23281 | ccctatgaat ttatctcgta atttctaggg gatcatctga agttatttac taagttagaa |
| 23341 | gcagtcaata atgaaatcag catgttacac caattagaat ttgttatcaa ctctcccttg |
| 23401 | tggatttcaa ggtaatttcc tgaggcagag cagtcctgct gggaagcagt aaagaatagt |
| 23461 | agagttatga agcctttaat cagtgatgtt ggtcataatt gcatatgatt ttgattaaaa |
| 23521 | gcttaccact ccaatttcaa aacttagttt tataaaaaga gaaaaagcaa atggaaagca |
| 23581 | acctttaagt agaattttaa attgggaata ttttcatagg ttggtttctt gttttttcaa |
| 23641 | ggattcatga ttaattatag tgaattaaat aataaccata ataatactta attgagtaat |
| 23701 | ttatctctca bitgttcagc cttcaggctt tttatataaa tattaataat cagaaatttt |
| 23761 | taaaaaggtt tcttgggggc tgggcacagt ggctcacgcc tttaatccca gcactttggg |
| 23821 | aggctgaggt gggcggatca caaggttaag agatcaagac cagcctggcc aacatggtga |
| 23881 | aactccgtct ctactaaaaa tacaaaaatt agctgggcat ggtggcgcat acctgtaatc |
| 23941 | ccagctactt gggaggctga ggcaggagaa tcgcttgaac ccaggaggtg gaggttgcag |
| 24001 | tgagccgaga tcgcgccgct gcactccagc ctggcaacag agtgagaccc cgtctcaaaa |
| 24061 | aaaaaaaaaa aagtttctca ggatagaatg ttttattatg aggaaaaaaa taaaaaaaaa |
| 24121 | caaagtttag gtagactgtg tagtataatg cagtgctcca gacaactcat attatgtttt |
| 24181 | cagtgattga agaagcaaca tatgaaaaaa attggtatta agggatgaaa aaggagaaag |
| 24241 | gaatggagaa gatgttataa gggaataatt tagggactag ggtcacatct caaatggtaa |
| 24301 | tattgtatca gtatacttca agcagacgtt ttctctattc cttctattcc cctatatggg |
| 24361 | aattcaggat aatctcagga gagttcttga aaatgcagta aaaataaagg agagtttgcc |
| 24421 | tattgttgca taacacatta ccacaaaact tagctactta aaacaatatt tatctcagtt |
| 24481 | tctgtgggcc agaaatgctg acatggccta gatcagtttt tctgcttcag atgtctctgg |
| 24541 | aggctgcagt taagatgttg gcttgggctg caggcatctt agggcacagc tgaagcagag |
| 24601 | tgtgctttca agttcagtca gctgttgttt gcaggactca attcctcaca ggctgttgga |
| 24661 | ctgagggtct tagttcctcg ctggctattg gccagaggct gcctcaagtt ccttgtcgtg |
| 24721 | tggacctttc taacatggcg gcaaactaac acaagaactg aaaaccaaac accgcatgtt |
| 24781 | ctcactcata agtgggagtt gaacaatgag aacacatata cacaaggagg ggaacatcac |
| 24841 | aaaccagggc ctgttggtgg gtggggggca aagggaggga gagcattagg acaaatacct |
| 24901 | aatgcatgcg gggcttgaaa cctagatgac gggttgacgg gtgcagcaaa ccaccgtggc |
| 24961 | acatgcatac ctgtgtaaca aacctgcacg ttctgcacat gtatcccaga acttaaagta |
| 25021 | aaataagcta aaaaaaaaaa aaaaaaaaaa agcctgcaag tggagaagga ggagagagag |
| 25081 | agagagagtg tgtgtgagaa agtgagacag agtaagaaag aagggagctt gcaataagta |
| 25141 | gaaacaagac tgcaatcttt tttaacttca tcatggaagt ggtatcccat cacttttgct |
| 25201 | gtattctctt cataagaagc aagttactag gttcagctca cacacgaggg gaaggcattt |
| 25261 | acacaagggc atgactatca ggagatgggg accactgggg gttagtttca aagctgccta |
| 25321 | ccacaagaga ttttcaccag caccacaacc ccacacataa taaataaact ctacagttcc |
| 25381 | atggcaagct acaaggaagt ctttgtgttg tctttatcat aaaattgaat ctttccccca |
| 25441 | aaacacctgt agaaaggcta tgcagcatta agtatcaaag ggtcaaaatc taatttaaaa |
| 25501 | aataaattat gagagaaaag caagtactgt tttacaagaa agtatataat ttttttattc |
| 25561 | ccataggctt ctttttttgt taccttcaaa ttaactatgg tcaaaggatt gctcattcca |
| 25621 | gtaataagaa caggcttatt tcatcattta cataaatatc agtatcgggc acttgcaaat |
| 25681 | gagaaaactc tgatttgagt aaggattagt ttcacttcaa tttccattta tgcgtttgcc |
| 25741 | aagtttaaat cctactgtag ttacttaagc aaccaacaga aacatatttc ttgatgatgc |
| 25801 | taaaacctac ctacacctgg ctttaaagca gaagaaatgc tatccagctg tatcctataa |
| 25861 | attgcttgat aaataatatt tacatgttat ttctttacac gcttctattt acttccctat |
| 25921 | taaccagctt ctccagatgt attcagtgta attatgtaca ggacatggtg ttctacctca |
| 25981 | aagggaaata aaatacttat attctacaag gtatggtata aatgggaaag agcacagaga |
| 26041 | ttggttgtaa cttctctgca aacaatcttt ggttaaagga ctgacaaaaa atatccatct |
| 26101 | agtaaaagaa acaagcagta gaaatgtgaa aatgactgtg ttcagcataa ccctggcaca |
| 26161 | tgttggcaca ccaggaccat tccacctgct agccccagtg agctttcttt ctctctgcag |
| 26221 | ttatagatga agaatggcaa agaactcagt gcagccctag agaaacgtgc gtggaggtgg |
| 26281 | ccagtgagct ggggaagagt accaacacat tcttcaagcc cccttgtgtg aacgtgttcc |
| 26341 | gatgtggtgg ctgttgcaat gaagagagcc ttatctgtat gaacaccagc acctcgtaca |
| 26401 | tttccaaaca ggtataagga catcggcaag cctgccgtct ctaaagccct gatgataata |
| 26461 | gtgttgatag ctacaacaac cttgttgcta aacactgtac taaatgcttt atgtgcataa |
| 26521 | tcgcatttaa tctttgaaac aaatcaagag ggtattttat gctcctttat agatgaggaa |
| 26581 | actgaggctc agagaggtaa cttacttatc caagtttaca cggctgataa atagcagagc |
| 26641 | tgggattcaa acccaggtct gtgggaggcc agagcctgaa ctcttatcag ttattgtctc |
| 26701 | tctgatgcta tgatgtcaag actcagaaaa ccatatggaa gttactagga caggatgtta |
| 26761 | aaaggaatga agatagctga tggcaggttc tgtgttgctc aaatggagtg attgagaaaa |
| 26821 | atttaatgaa ggttgtgggc agaattgggg aaagagggat gggacagtga agcacctgaa |
| 26881 | gctagcaaaa agggtgagat ttocccaccc ttcgactgag gagacaaggg gagggagcag |
| 26941 | ttatgggaac ccagagggaa agcggagaag agggtttctg gactggccac tgtcaactct |
| 27001 | tagcctggca gggagtaggg gcaggggctg ggagaggcaa gagggtttat agatgtagcc |
| 27061 | catggagggc agcgtcctgg ggcacagagc ctgatgggga aggaagggga gaggatggtg |
| 27121 | tctctggagg ggcaaagaga gaatatctag cacaaaagac atttggaaat aattctgcag |
| 27181 | tccccatgaa agaaataatt cagccctctt catcttataa atttcccttt gcttagtagg |
| 27241 | taagttttcc tttctctggt taccatgttt ttaataaatg tcgcatatga gagcagtagt |
| 27301 | aacaaacttg ggaaagcaat actaaaaaac tgtacatcaa actacattat ttttggtatc |
| 27361 | bittgcaaat tctttgaatg ttgatatact tatttaattg tcagtttgcc tatatggttt |
| 27421 | attctccttt taactgcaaa aagaggtagt acaagaaaat tacatgcact gaatatatcc |
| 27481 | atgttaggta attttcttaa tgctgatttg ttttgttaat agatttactt atccttaatt |
| 27541 | ttgttcctcc accctctaaa atatccttta aactgcagag tttctttttc taaattcttt |
| 27601 | tagagaatct tggagcttgt gtgtatttta acctctacta tttgacaatt aggaaaaaaa |
| 27661 | aatgacccaa gtagggctaa gcatcaattc tgagtagaaa aaaagcttgc ataacgtaag |
| 27721 | agggtttagt tcatgatcat gtgattccct agagcatagc caaaaaattg tgcaagaaga |
| 27781 | tgaagtttat gcaaagtaaa cactacaaaa acactctcac tgagactcat ggaagttcca |
| 27841 | ttacatattg agatgtcaga ataaacacaa ccttaatgga ttgcttccac ttaatagata |
| 27901 | gttgagtact ttattttgac tgctgtactc aacaaatgat taatttcata caatgtactt |
| 27961 | aagtgtaagt gtacagcagt ttttcttcca aatatgcatt tttgaacatt ttaatagtag |
| 28021 | ttttttaaaa actatctctc gccccaaagt tatggactat ttggcaaacc acctcttaga |
| 28081 | aacaaagtga acaaatgaat actctatgta gtaaggacta catggaatgg tgattgaata |
| 28141 | gacaatgcat taaaatcaac ttcaaactca tccacacatc atagaaccac tcaagaaagt |
| 28201 | tgtgtaatct ctctgtacat ctgtttcttc acctgtaaga tggggataat aaaaacccac |
| 28261 | cccataatgt tgttataagg ggtaaatgag ttaacatgaa agcacttaca acagggcctg |
| 28321 | gcctacggaa agcgtagaaa gaatgatata catgttagct ataattattt gtttgggcat |
| 28381 | gatgatcttg tatcagtcag ctattaatac acagtgctac gtaacaaaca cactaaaact |
| 28441 | cagtggttcc aaacaacaat gatttactct cacttatgta tctgaggttc agttagttta |
| 28501 | gggtggattc agcbjggctt gactctaagc tgcagtgtga gtccaagtca acttctatgt |
| 28561 | ttcccatcgc ttggaccagc aagcctgccg gattatgttc ttttcatggc tatagcataa |
| 28621 | gtttgagaaa acaagcccca taaaacatgc acagttcaaa tttgtacttc tgtcatgtct |
| 28681 | gctaacatcc cactagccaa agaaagtgac atggccaaat aaaaagtcaa gagacaggaa |
| 28741 | actatatttc ttcaatagag atggtgtgag aagggatgaa taaatagttt gaataataat |
| 28801 | ctattctaat aaaatcctaa agaaactgca tagctttaat ctcatttaac ccttacgatt |
| 28861 | tacactcaaa tttaaagcag gagcagggat taacagtacc attttacaag agtatcaatg |
| 28921 | atcaaaaagt taaaagattt gaccaaactt aaacacttca taaagttaga tgagcctgtt |
| 28981 | tagttccatt cttaatggac aacttggcta aagtcattgc cgtaaatgac aaaggcaaaa |
| 29041 | attcagacta gaacaacttt aaaaatgata tataaaatta aaaaaatata ttgtggttat |
| 29101 | ctttctctgc tgtagctctt tgagatatca gtgcctttga catcagtacc tgaattagtg |
| 29161 | ccbittaaag ttgccaatca tacaggttgt aagtgottgc caacagoccc ccgccatcca |
| 29221 | tactcaatta tcagaagatc catccagatc cctgaagaag atcggtaagc acttttgttt |
| 29281 | ttttttttat actggattat gcttattttt gccttgccaa aactgtgtgt agaggatttt |
| 29341 | tcattaatgt agagttatca atttatcttc aaattattca tattttagct tctaacctga |
| 29401 | acctactggt aataactggc aaatacatat ttttattaga tgttagatat atattgtggt |
| 29461 | aggaccaaaa cgctcagtgg tatgagcttg tcatgtctac ttgtagacac gtttgttctt |
| 29521 | aatatgcata gtctactgca ggtgtaaaac cgctgtaacc tcaaatttag cacatgttcc |
| 29581 | agaacaagca ttaaataaaa cttatttcag gcbgtttgta tatttacatc ctgaaatgag |
| 29641 | agaaaacaaa gaagattcct ggggtcattg gggagtgaca aaactagcag cacgtgagtt |
| 29701 | ttgcaacttt ctaatctttc ccccttaaga ttaccaaatg gaaaaccctt attttaaatt |
| 29761 | aaaatgactt aaaattaatt tggctttgaa attctcttga gattaatttt gtgattattt |
| 29821 | ataagacaaa cgacaaaacc aaaggtaagg atcacttatt tgaagaaaaa aaaggattta |
| 29881 | atataaagaa acaagtaaag ggtaactgaa tgaaaagatc attagttaga tacttagact |
| 29941 | ttgcaaaagt aaagcaataa atatattgtg tgagtggcaa gtaaaagagt aagctggtga |
| 30001 | ttagttaaca ttgaaccaag aagacacctc ccgcctctct ccagcagaaa agaaaacttg |
| 30061 | tagaaaagca acatttattc tcaagatgtt cctgcbgttc tggccaatgc ttttatcttt |
| 30121 | attttaaaga aaataatctt aggggccggg cacggtggct cacacctgta atcccagcag |
| 30181 | tatgggaggc tgaggcgggc agatcacgag gtcaggagat tgagaccatc ctggctaaca |
| 30241 | cggtgcaact ccgtctctac taaaaatata aaaaaaaatt agccgggtgt ggtggtgggt |
| 30301 | gcctgtagtc ccagttactt gggaggctga ggcaggagaa tggcatgaac ctgggaggtg |
| 30361 | gagcttgcag tgagccgaga tcgcgccact gcactccagc ctgggcaaca gagggagact |
| 30421 | ccgtcaaaaa aaaaagaaaa gaaaataatc ttaggaggta tgttagaaca tatttaattt |
| 30481 | tcgtaaataa actgttgaca gctataattt gcatagtttt aacatatacc ttcttaagaa |
| 30541 | gattacaatt tccaaaatta cagtttagtt tctaaacatt tccacgtaga atatttataa |
| 30601 | ttacagaatc actatctagt aagatgcagt tcataaatac aaattaagct cctttaaaat |
| 30661 | cttttttttt tttgagacgg agtttcgctc ttgttgcccc ggctggagtg caatggcgag |
| 30721 | atctojgctc actgcaacct ccgcctccca ggttcaagtg attctcctgc ctcagccttc |
| 30781 | caagtagctg ggattacagg catgtgccgc cacgcccggc taattttgta tttttcagta |
| 30841 | gagatggggt ttctccatat tagtcaggct ggtctcgaac tcccgacctc aggtgatctg |
| 30901 | cccgcctcgg actcccaaag tgctgggatt acaggcgtga gccaccgcac ctggcccgct |
| 30961 | cctttaaaat cttaactctt ctcacatcct tatcattttg tggtgagaac atttgaaatt |
| 31021 | tactctctta gcaatttgga aatataaaat acattattat tattgactat agttaccatg |
| 31081 | ctgtgcaata gatctcaaaa ccttatttct ccaaactgag tataaaaagc aaaaaataaa |
| 31141 | tttaaaaaat cttaactatt atctactcag gaatttattt aatgttccaa agttttgatt |
| 31201 | atccttgaaa gcttttaaat ctggttcatt gttttctttt cctagcbgtt cccattccaa |
| 31261 | gaaactctgt cctattgaca tgctatggga tagcaacaaa tgtaaatgtg ttttgcagga |
| 31321 | ggaaaatcca cttgctggaa cagaaggtaa tgatagtagt agtaaaataa taacagtaat |
| 31381 | aataaaagta gcaacaatag cagcaaccgt tattgagtac ttagtatgac cagacaatgt |
| 31441 | tgtaaatott gtatatgttt taactcattt aattctcaca acaaccctgt aatgtactat |
| 31501 | tgttatttct ttttttacaa ttacaaaatg ggcacaccaa gatatcgagt aatttcctca |
| 31561 | aggtcacaca gctgagagtg atagaagtgg tcagattcca gaaccctctg taccataatc |
| 31621 | atatagtaag tccatcaatg catcactctg ctttttaatc tcaaagaaaa gcccagagtg |
| 31681 | gttggagcat cctgaaacac tgaaattgaa aggggatgtt aaacttgaat gaaagctgct |
| 31741 | tcagaactaa atactagtca actgcagttt actaatttat ttgtataaaa gtctcacagg |
| 31801 | aacataaagt aattttggac ttggtttctg tcagctgcat catatgaaaa cacgccagta |
| 31861 | atttgaaaaa agaaatggag aataagagaa aatttttctg gaattagggc aaagcaaaag |
| 31921 | caaaatatgg ctattggtct aaggggagct gggagcaaaa tgagatatag tcaaattgtc |
| 31981 | attgctcata atccgtaatt ctgtgacttt gggtgatgaa catttgcttg aaaatgaatg |
| 32041 | cattttaatg tattttccag agagctttac atggttccac caaaaaaaaa aaagaaagaa |
| 32101 | aaaaaaagtc acaagtagtc atgcagtttt aaccttgctt gttttaaact ataatctata |
| 32161 | agcaagaaca gtaagggcta aactctaaga aatctgtcct ataaactgta aatagcaacc |
| 32221 | tactctccat tcttctgcct ctcagcttcc ttctaaatgt tttcacgaaa gctcagccca |
| 32281 | gagcatgtgg ggaaatttaa tatttatgtg gtttaaatgc ccatgccgat cttgaatgtt |
| 32341 | ctttacaccc ttcccaccaa gtgttcagcc atcctctacc agaacataca tcagttattt |
| 32401 | ggagactcgc catccagtga ggcagcacca aggggtgggc acactcctgt tgttatactg |
| 32461 | aaatgaaatc tctctccaga acagaccaga ctgcccaatg gaatacaata agagtcatat |
| 32521 | atgtaactca cattttacat taaaaagata aaaagaaaca agtgaaattt atcttaatat |
| 32581 | attttattta atccaatcta tccaatgtac tatcatttca acatgcaatc aatataaaaa |
| 32641 | atttatgagc tagcctacat tctttgtgct aagtctttga aatccagtgt gtgttgtaca |
| 32701 | cttacagcac atctcaattt agactctcta tttcatgccc aatagtcaca tatggcccat |
| 32761 | agctaccttg ttggacagcc cagctcaaga gcatcaactc attagttcag gttttaccct |
| 32821 | atagaaccat gtaaaacaaa tctaattctt tctccatgtg actcatgttc taaaagtgtt |
| 32881 | agaaaatttt tgtggggttg gccgggaatg gtggctcatg cctgtaatcc tagcactttg |
| 32941 | ggaggccgag atgggaggat cacttgaggt tgggagtttg aaaaccagcc gggccggccg |
| 33001 | ggcgcggtgg ctcacgcctg tagtcccagc actttgggag gccgaggcgg gcggatcacg |
| 33061 | aggtcaggag attgagacca tcctggctaa aacggtgaaa ccccgtctct actaaaaata |
| 33121 | caaaaaaaaa attagccggg cgtagtggcg ggcgcctgta gtcccagcta cttgggaggc |
| 33181 | tgaggcagga gaatggcgtg aacccgggag gcggagcttg cagtgagccg agatcccgcc |
| 33241 | actgcactcc agcctgggca acagagcgag actccgtctc aaaaaaagaa aaaaaaaaaa |
| 33301 | aagaaaacca gccgggccaa catggcgaaa tcccatctct actactacta aaaaaaaaaa |
| 33361 | aaaaaaaaaa aaaaaaaaaa aaaaaatagc tgggcatggt gatgtgcgcc tgtagtccca |
| 33421 | gctactcagg aggctgaggc atgagaatct cttgaacctg ggaggcagag gttgcagtga |
| 33481 | gccgaggtca tgccaccgca ctcgggcctg gatgacagag tgagactctg cctccaaaaa |
| 33541 | aagaaagaaa gaaagaaaga gagaaagaga aaaagaaaag aaaagaaaga gagagagaga |
| 33601 | gaaagaaaga aagaaaagaa aagaaagaga gagaaagaaa gaaagaaaag aaagaaaaag |
| 33661 | aaaggaagga aggaaggata gaaagaaaga aagagaaaga aagtaagtta ctgtgggaag |
| 33721 | ggcaatatac ttagagctta aaggctctag ctgaggattt cctggcacaa agcctctgag |
| 33781 | acagttttgt acggaggagg tttgtaggca ggcacaaggc attaaagggt aaagagagag |
| 33841 | gcagcagacc acagcgcagt tgctaagagg catcagccta agccaatggg aagttgaagc |
| 33901 | tgggaacccc tgcgggggta agtcttaaat ctaggtgaag aggctgagcc ctgtagaccg |
| 33961 | ttcattggct gccttggaga ggggatgtag ccttaggaga ggcagcttat ttctgctgga |
| 34021 | gataattctt gggaaggcac tcagccagta cacgtgtgta gagggtggta agaagaatag |
| 34081 | ggaagaagag aagtgctgtt ctaagcagcg ggtatatgag cactcagggc tggaggtgag |
| 34141 | agaacatact ggaagaagtt cagcatggtg gggatataat gggtggggac ataatgggga |
| 34201 | aggggctggt tagatgtgag agaagaagct ggacaggctc acaggggcaa agcagaagga |
| 34261 | ccttgtaatt cttgcatggg agcttggatg tgatactaag gacaaaggga aaccacacaa |
| 34321 | ctggctaaag caggagagtg acagtaccca ttagaatttt aacaaaatca tatcagcaac |
| 34381 | agtgtagaag aggatgtgtt gactcggggc agggaaggag gcaggaaacc ttttgggaag |
| 34441 | ttgtagcaat gatgtaagtg agaggcgcag ggtggactgg atcacaattg tttctcattc |
| 34501 | tcatctccta taagtcccca atgtggatca agttcacatt catttctcca gtggccccat |
| 34561 | caaattgatg ggatttactg agcttactgc tcactatact ttttttccgc acatgtgact |
| 34621 | gttaagccaa ctgccttttc tacagtgact tctcttgccc agatgagcac atttaggtta |
| 34681 | gtgaatccaa gtctaattta attgagtctt gttagagtca ggtcattgct ctaaattgtt |
| 34741 | aaaacaaacg atatacacaa acacacacac acacaaaaga ataaattgag gaggtcccaa |
| 34801 | ttctgtattt taaaatactt aatatatccc ttccttcttg aagagagcta caatttcaag |
| 34861 | aatttatttt gaaaaaattc tatcagttta ttgataaaaa tggtaaaagg aacaaagctg |
| 34921 | agaacagaac atatcatcag actctctagg gacggaaatc aatacataat acttcaagat |
| 34981 | atcaccctca gctacttgct gttccaccac cagttctctt gcatccagtt tttgtttctt |
| 35041 | ttaacttggc tataaggatg tgagcacaga ctctgccaaa cagcctgctg aagttctgca |
| 35101 | aacaccttgt ggattgtgtt tccctgaaca accctgtcca acaatggcct tgggcctgtc |
| 35161 | tgaagtattc ttagtgaact tctgctgcca cctagtgatc attgcgaatt tttaaaaagc |
| 35221 | ctctttatcc tttaacaagt tactcttgtc ttaccccaaa gcggcatctg cctcactggc |
| 35281 | atatgactta cagagctcac attttccctc tccacaaagt tcaaaatgga gacttctcag |
| 35341 | atttagcctt ccagcaccca ttctcaaacg tcgtgcatta cagaaaagtt taaactataa |
| 35401 | agttgaaccg cacgagattc tcattttgat atgtcattaa agtcagatat tggcaagaac |
| 35461 | atatggttta acccaatggc ttggaatgct ggatgggatt cccagaagct ccatacatcg |
| 35521 | gcctgcttca ggaccctttt attacaccaa ataaacccaa caaacatcca tcgagtgcct |
| 35581 | attttatatc agaacaatga gacctgctcc ttctccttca ggacatttta cttaatgggg |
| 35641 | gaaacataca agtaaacaga caaatgtaat cagtgcaaga aagaatcgga cagcaatatg |
| 35701 | cacaggataa ggacacttag ctaaacctgc agacattggg aaagatgtca gggaaaaggg |
| 35761 | atggcagaag gaaagacaag gccaaaggca tgggactggg aggcactgga atatcagggc |
| 35821 | aacagaaagt gctgtcattt ggtataaatg gaacacacag gatatatgaa agcaagaaac |
| 35881 | agaagatgag tctgtgaggt tactatgatc cagttcatgg agggccttgt atgtcctggt |
| 35941 | gggaaaattg gtttttattg tgggaaggga accttttaat gcattcaaag cagtggaatg |
| 36001 | aagtgatttg gtttgcattt gttaatcatg tgaagaagaa taggttggag ggataaaact |
| 36061 | tgtggtggtg agatgagtga cagagcgaca gccatctaca aaagaaacac aaggtacaga |
| 36121 | ctgaattgtg ggagtggtag tggggatgga aaataaagaa caaatttaga gaggcagaac |
| 36181 | tgagtggaca tgatgctcag acttaccaga gcaggtgagt caagaatgat gtcaccattc |
| 36241 | cctaaatgag gcaaactggg agagaagcag atttggggag aaaactacta aacatgtacg |
| 36301 | tccctccaaa accttcaaga atgctaaagg gacagagtca agttcttcca aagtttctgt |
| 36361 | ctcttccatt tattttgcaa tgaatttcaa cttgttaatc agaaatggat ttggagtagt |
| 36421 | agctattcaa ttgttttata caccttctag aagaaatatt tgtcagatga gtatgtcaaa |
| 36481 | aacttctcag accctcccct ttacttgaat gtatcttcca gcagatgttg gtggaatcaa |
| 36541 | agttcattat tactcctata tcttttatac tagtgttatg atctgcagtg aggacatgca |
| 36601 | ttgctattgc tacgcctggc ctggaatgtc tgaggtgtat ttctacaaca ccaattattt |
| 36661 | tgtgtgtctc tccttttaat ctccaccaaa aaatggagac agctagattc ataaccctta |
| 36721 | gacatcctat attttattac taatacttgg ttgtggaagt ttgcattcta aacaagtcat |
| 36781 | caacataaaa atctctaaaa atattttatg aaaaatattc agcttatgat attttaaaaa |
| 36841 | tcacaaacct aagaaaacac acaaacctgt gtttgtattg tgaaatcaga ggttaatctt |
| 36901 | cctcaccctg tgaaaaaatt aggggcataa atctatagga aggagattgg gtgaatccaa |
| 36961 | gttacttacg gatgacataa aagatacaat caactttggt gatccaattg ccacactaca |
| 37021 | actatctgac caacacgttt ctgtttctct ttagaccact ctcatctcca ggaaccagct |
| 37081 | ctctgtgggc cacacatgat gtttgacgaa gatcgttgcg agtgtgtctg taaaacacca |
| 37141 | tgtcccaaag atctaatcca gcaccccaaa aactgcagtt gctttgagtg caaagaaagt |
| 37201 | ctggagacct gctgccagaa gcacaagcta tttcacccag acacctgcag gtaaatgcct |
| 37261 | tgagttgtct tgcctttact catgacattt aacgtagatg ccattttaat ttggtgggat |
| 37321 | tccttagtaa gctaattttt ccccttggtg cctgagtccc ttttggataa tagaacagag |
| 37381 | gtttagcagc taaggaataa gcaagagtat accgagtcat gattaatcat gaaaataaga |
| 37441 | aaatcaatcc tgcctgttat tatgtgtgta gagctttttt tttttagacg gagtctcgct |
| 37501 | ctgtctccag gctggagtgc agtggcgtga tctgggctca ctgcaacctc cgtctctctg |
| 37561 | gttcaaggga gtctcctgcc tcagcctccc aagtagctgg gattacaggc acgtgccacc |
| 37621 | acacccagct aatttttgta tttcagtaga gacggggttt caccatgttg gccaggatag |
| 37681 | tcttgatctc ctgacctcat gatccacccg tctojgcctc ccaaagtgct gggattacag |
| 37741 | gcatgagcca ccgcgcccac cojgggttta gagctcttaa acaacaatga aattggtaaa |
| 37801 | atttaagcag ttattaggat attgcttaat aataatattt taggaagggg aggtttcaga |
| 37861 | tcatcaacct gtttagttca atctctcatt gtttatgtct atatatgttt gtttttttct |
| 37921 | ttaatggagg gaatatcatt ggatttatat agcaagtaat ttattcatga atagaacact |
| 37981 | tggaggttac tgattcactt cagtagattt tgaatccatg tgggataacc atgcaggatt |
| 38041 | ttatactgac attttaaata catgtctgga aaacttaatc aaatcagagc agagttattc |
| 38101 | ttttgaatcc agtcattgat tctgaattct catctttatt ttcttttgca acagctgtga |
| 38161 | ggacagatgc ccctttcata ccagaccatg tgcaagtggc aaaacagcat gtgcaaagca |
| 38221 | ttgccgcttt ccaaaggaga aaagggctgc ccaggggccc cacagccgaa agaatccttg |
| 38281 | attcagcgtt ccaagttocc catocctgtc atttttaaca gcatgctgct ttgccaagtt |
| 38341 | gcbgtcactg tttttttccc aggtgttaaa aaaaaaatcc attttacaca gcaccacagt |
| 38401 | gaatccagac caaccttcca ttcacaccag ctaaggagtc cctggttcat tgatggatgt |
| 38461 | cttctagctg cagatgcctc tgcgcaccaa ggaatggaga ggaggggacc catgtaatcc |
| 38521 | ttttgtttag ttttgttttt gttttttggt gaatgagaaa ggtgtgctgg tcatggaatg |
| 38581 | gcaggtgtca tatgactgat tactcagagc agatgaggaa aactgtagtc tctgagtcct |
| 38641 | ttgctaatcg caactcttgt gaattattct gattcttttt tatgcagaat ttgattcgta |
| 38701 | tgatcagtac tgactttctg attactgtcc agcttatagt cttccagttt aatgaactac |
| 38761 | catctgatgt ttcatattta agtgtattta aagaaaataa acaccattat tcaagccata |
| 38821 | taa |

[0202] In some embodiments of any of the vectors described herein, the vector includes a sequence encoding an antibody or antigen-binding antibody fragment that can bind specifically to VEGF. In some embodiments, an antibody or antigen-binding antibody fragment can include a human IgG Fc domain (e.g., SEQ ID NO: 113). In some embodiments, the sequence encoding an antibody or antigen-binding fragment can further include a sequence encoding a secretion signal sequence (e.g., SEQ ID NO: 92). In some embodiments of any of the vectors described herein, the vector comprises a sequence of a T2A peptidase (e.g., SEQ ID NO: 99).

[0203] In some embodiments, the antibody can be a humanized antibody, a chimeric antibody, or a multivalent antibody. In some embodiments, an antibody or an antigen-binding antibody fragment can be a scFv-Fc, a V_{H}H domain, a V_{NAR} domain, a (scFv)₂, a minibody, or a BiTE. In some embodiments, an antibody or an antigen-binding antibody fragment can be a DVD-Ig, and a dual-affinity re-targeting antibody (DART), a triomab, kih IgG with a common LC, a crossmab, an ortho-Fab IgG, a 2-in-1-IgG, IgG-ScFv, scFv₂-Fc, a bi-nanobody, tanden antibody, a DART-Fc, a scFv-HAS-scFv, DNL-Fab3, DAF (two-in-one or four-in-one), DutaMab, DT-IgG, knobs-in-holes common LC, knobs-in-holes assembly, charge pair antibody, Fab-arm exchange antibody, SEEDbody, Triomab, LUZ-Y, Fcab, kλ-body, orthogonal Fab, DVD-IgG, IgG(H)-scFv, scFv-(H)IgG, IgG(L)-scFv, scFv-(L)-IgG, IgG (L,H)-Fc, IgG(H)-V, V(H)-IgG, IgG(L)-V, V(L)-IgG, KIH IgG-scFab, 2scFv-IgG, IgG-2scFv, scFv4-Ig, Zybody, DVI-IgG, nanobody, nanobody-HSA, a diabody, a TandAb, scDiabody, scDiabody-CH3, Diabody-CH3, Triple Body, miniantibody, minibody, TriBi minibody, scFv-CH3 MIL Fab-scFv, scFv-CH-CL-scFv, F(ab′)₂-scFV₂, scFv-KIH, Fab-scFv-Fc, tetravalent HCAb, scDiabody-Fc, diabody-Fc, tandem scFv-Fc, intrabody, dock and lock bispecific antibody, ImmTAC, HSAbody, scDiabody-HAS, tandem scFv, IgG-IgG, Cov-X-Body, and scFv1-PEG-scFv2.

[0204] Additional examples of an antibody or an antigen-binding antibody fragment include an Fv fragment, a Fab fragment, a F(ab′)2 fragment, and a Fab′ fragment. Additional examples of an antibody or an antigen-binding antibody fragment include an antigen-binding fragment of an IgG (e.g., an antigen-binding fragment of IgG1, IgG2, IgG3, or IgG4) (e.g., an antigen-binding fragment of a human or humanized IgG, e.g., human or humanized IgG1, IgG2, IgG3, or IgG4); an antigen-binding fragment of an IgA (e.g., an antigen-binding fragment of IgA1 or IgA2) (e.g., an antigen-binding fragment of a human or humanized IgA, e.g., a human or humanized IgA1 or IgA2); an antigen-binding fragment of an IgD (e.g., an antigen-binding fragment of a human or humanized IgD); an antigen-binding fragment of an IgE (e.g., an antigen-binding fragment of a human or humanized IgE); or an antigen-binding fragment of an IgM (e.g., an antigen-binding fragment of a human or humanized IgM).

[0205] Any of the antibodies or antigen-binding antibody fragments described herein can bind specifically to VEGF.

[0206] A V_{H}H domain is a single monomeric variable antibody domain that can be found in camelids. A V_{NAR} domain is a single monomeric variable antibody domain that can be found in cartilaginous fish. Non-limiting aspects of V_{H}H domains and V_{NAR} domains are described in, e.g., Cromie et al., Curr. Top. Med. Chem. 15:2543-2557, 2016; De Genst et al., Dev. Comp. Immunol. 30:187-198, 2006; De Meyer et al., Trends Biotechnol. 32:263-270, 2014; Kijanka et al., Nanomedicine 10:161-174, 2015; Kovaleva et al., Expert. Opin. Biol. Ther 14:1527-1539, 2014; Krah et al., Immunopharmacol. Immunotoxicol. 38:21-28, 2016; Mujic-Delic et al., Trends Pharmacol. Sci. 35:247-255, 2014; Muyldermans, J. Biotechnol. 74:277-302, 2001; Muyldermans et al., Trends Biochem. Sci. 26:230-235, 2001; Muyldermans, Ann. Rev. Biochem. 82:775-797, 2013; Rahbarizadeh et al., Immunol. Invest. 40:299-338, 2011; Van Audenhove et al., EBioMedicine 8:40-48, 2016; Van Bockstaele et al., Curr. Opin. Investig. Drugs 10:1212-1224, 2009; Vincke et al., Methods Mol. Biol. 911:15-26, 2012; and Wesolowski et al., Med. Microbiol. Immunol. 198:157-174, 2009.

[0207] A “Fv” fragment includes a non-covalently-linked dimer of one heavy chain variable domain and one light chain variable domain.

[0208] A “Fab” fragment includes, the constant domain of the light chain and the first constant domain (C_{H1}) of the heavy chain, in addition to the heavy and light chain variable domains of the Fv fragment.

[0209] A “F(ab′)₂” fragment includes two Fab fragments joined, near the hinge region, by disulfide bonds.

[0210] A “dual variable domain immunoglobulin” or “DVD-Ig” refers to multivalent and multispecific binding proteins as described, e.g., in DiGiammarino et al., Methods Mol. Biol. 899:145-156, 2012; Jakob et al., MABs 5:358-363, 2013; and U.S. Pat. Nos. 7,612,181; 8,258,268; 8,586,714; 8,716,450; 8,722,855; 8,735,546; and 8,822,645, each of which is incorporated by reference in its entirety.

[0211] DARTs are described in, e.g., Garber, Nature Reviews Drug Discovery 13:799-801, 2014.

[0212] Additional aspects of antibodies and antigen-binding antibody fragments are known in the art.

[0213] In some embodiments, any of the antibodies or antigen-binding antibody fragments described herein has a dissociation constant (KO of less than 1×10⁻⁵ M (e.g., less than 0.5×10⁻⁵ M, less than 1×10⁻⁶ M, less than 0.5×10⁻⁶ M, less than 1×10⁻⁷ M, less than 0.5×10⁻⁷ M, less than 1×10⁻⁸ M, less than 0.5×10⁻⁸ M, less than 1×10⁻⁹ M, less than 0.5×10⁻⁹ M, less than 1×10⁻¹⁰ M, less than 0.5×10⁻¹⁰ M, less than 1×10⁻¹¹ M, less than 0.5×10⁻¹¹ M, or less than 1×10⁻¹² M), e.g., as measured in phosphate buffered saline using surface plasmon resonance (SPR) for a VEGF protein (e.g., any of the VEGF proteins described herein, e.g., one or more of mature human VEGF-A, mature human VEGF-B, mature human VEGF-C, and mature human VEGF-D).

[0214] In some embodiments, any of the antibodies or antigen-binding antibody fragments described herein has a K_{D} of about 1×10⁻¹² M to about 1×10⁻⁵ M, about 0.5×10⁻⁵ M, about 1×10⁻⁶ M, about 0.5×10⁻⁶ M, about 1×10⁻⁷ M, about 0.5×10⁻⁷ M, about 1×10⁻⁸ M, about 0.5×10⁻⁸ M, about 1×10⁻⁹ M, about 0.5×10⁻⁹ M, about 1×10⁻¹⁰ M, about 0.5×10⁻¹⁰ M, about 1×10⁻¹¹ M, or about 0.5×10⁻¹¹ M (inclusive); about 0.5×10⁻¹¹ M to about 1×10⁻⁵ M, about 0.5×10⁻⁵ M, about 1×10⁻⁶ M, about 0.5×10⁻⁶ M, about 1×10⁻⁷ M, about 0.5×10⁻⁷ M, about 1×10⁻⁸ M, about 0.5×10⁻⁸ M, about 1×10⁻⁹ M, about 0.5×10⁻⁹ M, about 1×10⁻¹⁰ M, about 0.5×10⁻¹⁰ M, or about 1×10⁻¹¹ M (inclusive); about 1×10⁻¹¹ M to about 1×10⁻⁵ M, about 0.5×10⁻⁵ M, about 1×10⁻⁶ M, about 0.5×10⁻⁶ M, about 1×10⁻⁷ M, about 0.5×10⁻⁷ M, about 1×10⁻⁸ M, about 0.5×10⁻⁸ M, about 1×10⁻⁹ M, about 0.5×10⁻⁹ M, about 1×10⁻¹⁰ M, or about 0.5×10⁻¹⁰ M (inclusive); about 0.5×10⁻¹⁰ M to about 1×10⁻⁵ M, about 0.5×10⁻⁵ M, about 1×10⁻⁶ M, about 0.5×10⁻⁶ M, about 1×10⁻⁷ M, about 0.5×10⁻⁷ M, about 1×10⁻⁸ M, about 0.5×10⁻⁸ M, about 1×10⁻⁹ M, about 0.5×10⁻⁹ M, or about 1×10⁻¹⁰ M (inclusive); about 1×10⁻¹⁰ M to about 1×10⁻⁵ M, about 0.5×10⁻⁵ M, about 1×10⁻⁶ M, about 0.5×10⁻⁶ M, about 1×10⁻⁷ M, about 0.5×10⁻⁷ M, about 1×10⁻⁸ M, about 0.5×10⁻⁸ M, about 1×10⁻⁹ M, or about 0.5×10⁻⁹ M (inclusive); about 0.5×10⁻⁹ M to about 1×10⁻⁵ M, about 0.5×10⁻⁵ M, about 1×10⁻⁶ M, about 0.5×10⁻⁶ M, about 1×10⁻⁷ M, about 0.5×10⁻⁷ M, about 1×10⁻⁸ M, about 0.5×10⁻⁸ M, or about 1×10⁻⁹ M (inclusive); about 1×10⁻⁹ M to about 1×10⁻⁵ M, about 0.5×10⁻⁵ M, about 1×10⁻⁶ M, about 0.5×10⁻⁶ M, about 1×10⁻⁷ M, about 0.5×10⁻⁷ M, about 1×10⁻⁸ M, or about 0.5×10⁻⁸ M (inclusive); about 0.5×10⁻⁸ M to about 1×10⁻⁵ M, about 0.5×10⁻⁵ M, about 1×10⁻⁶ M, about 0.5×10⁻⁶ M, about 1×10⁻⁷ M, about 0.5×10⁻⁷ M, or about 1×10⁻⁸ M (inclusive); about 1×10⁻⁸ M to about 1×10⁻⁵ M, about 0.5×10⁻⁵ M, about 1×10⁻⁶ M, about 0.5×10⁻⁶ M, about 1×10⁻⁷ M, or about 0.5×10⁻⁷ M (inclusive); about 0.5×10⁻⁷ M to about 1×10⁻⁵ M, about 0.5×10⁻⁵ M, about 1×10⁻⁶ M, about 0.5×10⁻⁶ M, or about 1×10⁻⁷ M (inclusive); about 1×10⁻⁷ M to about 1×10⁻⁵ M, about 0.5×10⁻⁵ M, about 1×10⁻⁶ M, or about 0.5×10⁻⁶ M (inclusive); about 0.5×10⁻⁶ M to about 1×10⁻⁵ M, about 0.5×10⁻⁵ M, or about 1×10⁻⁶ M (inclusive); about 1×10⁻⁶ M to about 1×10⁻⁵ M or about 0.5×10⁻⁵ M (inclusive); or about 0.5×10⁻⁵ M to about 1×10⁻⁵ M (inclusive), e.g., as measured in phosphate buffered saline using surface plasmon resonance (SPR), for a VEGF protein (e.g., any of the VEGF proteins described herein, e.g., one or more of mature human VEGF-A, mature human VEGF-B, mature human VEGF-C, and mature human VEGF-D).

[0215] A variety of different methods known in the art can be used to determine the K_{D} values of any of the antibodies or antigen-binding antibody fragments described herein (e.g., an electrophoretic mobility shift assay, a filter binding assay, surface plasmon resonance, and a biomolecular binding kinetics assay, etc.).

[0216] In some embodiments of any of the antibodies and/or antigen-binding antibody fragments described herein, the half-life of the antibody and/or the antigen-binding antibody fragment in a subject (e.g., a human) is decreased about 0.5-fold to about 4-fold (e.g., about 0.5-fold to about 3.5-fold, about 0.5-fold to about 3-fold, about 0.5-fold to about 2.5-fold, about 0.5-fold to about 2-fold, about 0.5-fold to about 1.5-fold, about 0.5-fold to about 1-fold, about 1-fold to about 4-fold, about 1-fold to about 3.5-fold, about 1-fold to about 3-fold, about 1-fold to about 2.5-fold, about 1-fold to about 2-fold, about 1.5-fold to about 4-fold, about 1.5-fold to about 3.5-fold, about 1.5-fold to about 3-fold, about 1.5-fold to about 2.5-fold, about 1.5-fold to about 2-fold, about 2-fold to about 4-fold, about 2-fold to about 3.5-fold, about 2-fold to about 3-fold, about 2-fold to about 2.5-fold, about 2.5-fold to about 4-fold, about 2.5-fold to about 3.5-fold, about 2.5-fold to about 3-fold, about 3-fold to about 4-fold, about 3-fold to about 3.5-fold, or about 3.5-fold to about 4-fold) as compared to the half-life of a control antibody and/or a control antigen-binding antibody fragment (e.g., any of the control antibodies and control antigen-binding antibody fragments described herein) in a similar subject. See, e.g., Leabman et al., MAbs. 5(6): 896-903, 2013. In some embodiments, an antibody or antigen-binding antibody fragment described herein has one or more amino acid substitutions in the Fc region that decrease its half-life in a mammal, and a control antibody lacks at least one (e.g., lacks all) of these one or more amino acid substitutions in the Fc region.

[0217] In some examples of any of the antibodies and antigen-binding fragments thereof described herein, the antibody and antigen-binding fragment can bind to a VEGF antigen (e.g., any of the exemplary VEGF proteins described herein, e.g., one or more of mature human VEGF-A, mature human VEGF-B, mature human VEGF-C, and mature human VEGF-D) (e.g., any of the binding affinities described herein).

[0218] In some embodiments described herein, an antibody or antigen-binding antibody fragment can decrease an activity of a VEGF (e.g., one or more of any of the exemplary VEGF proteins described herein, e.g., one or more of mature human VEGF-A, mature human VEGF-B, mature human VEGF-C, and mature human VEGF-D). In some embodiments, an antibody or antigen-binding antibody fragment can block a VEGF (e.g., one or more of any of the exemplary VEGF proteins described herein, e.g., one or more of mature human VEGF-A, mature human VEGF-B, mature human VEGF-C, and mature human VEGF-D) from binding to one or more of its receptors (e.g., one or more VEGF receptors) See, e.g., WO 1998/045331, U.S. Pat. No. 9,079,953, US 2015/0147317, US 2016/0289314, Plotkin et al., Otology & Neurotology 33: 1046-1052 (2012); and Ferrara et al. (2005) Biochem Biophys Res Commun 333(2): 328-335. In some embodiments, an antibody or antigen-binding antibody can decrease downstream signaling (e.g., signaling downstream of a VEGF receptor, e.g., one or more of any of the exemplary VEGF receptors described herein, e.g., one or more of human VEGFR-1 (SEQ ID NO: 111), human VEGFR-2 (SEQ ID NO: 112), and human VEGFR-3). In some embodiments, a decrease in an activity of a VEGF can be detected indirectly, e.g., through an increase in hearing (e.g., a 1% to about 400% increase (or any of the subranges of this range described herein) in hearing) or a decrease (e.g., a 1% to 99%, a 1% to 95%, a 1% to 90%, a 1% to 85%, a 1% to 80%, a 1% to 75%, a 1% to 70%, a 1% to 65%, a 1% to 60%, a 1% to 55%, a 1% to 50%, a 1% to 45%, a 1% to 40%, a 1% to 35%, a 1% to 30%, a 1% to 25%, a 1% to 20%, a 1% to 15%, a 1% to 10%, a 1% to 5%, a 5% to 99%, a 5% to 95%, a 5% to 90%, a 5% to 85%, a 5% to 80%, a 5% to 75%, a 5% to 70%, a 5% to 65%, a 5% to 60%, a 5% to 55%, a 5% to 50%, a 5% to 45%, a 5% to 40%, a 5% to 35%, a 5% to 30%, a 5% to 25%, a 5% to 20%, a 5% to 15%, a 5% to 10%, a 10% to 99%, a 10% to 95%, a 10% to 90%, a 10% to 85%, a 10% to 80%, a 10% to 75%, a 10% to 70%, a 10% to 65%, a 10% to 60%, a 10% to 55%, a 10% to 50%, a 10% to 45%, a 10% to 40%, a 10% to 35%, a 10% to 30%, a 10% to 25%, a 10% to 20%, a 10% to 15%, a 15% to 99%, a 15% to 95%, a 15% to 90%, a 15% to 85%, a 15% to 80%, a 15% to 75%, a 15% to 70%, a 15% to 65%, a 15% to 60%, a 15% to 55%, a 15% to 50%, a 15% to 45%, a 15% to 40%, a 15% to 35%, a 15% to 30%, a 15% to 25%, a 15% to 20%, a 20% to 99%, a 20% to 95%, a 20% to 90%, a 20% to 85%, a 20% to 80%, a 20% to 75%, a 20% to 70%, a 20% to 65%, a 20% to 60%, a 20% to 55%, a 20% to 50%, a 20% to 45%, a 20% to 40%, a 20% to 35%, a 20% to 30%, a 20% to 25%, a 25% to 99%, a 25% to 95%, a 25% to 90%, a 25% to 85%, a 25% to 80%, a 25% to 75%, a 25% to 70%, a 25% to 65%, a 25% to 60%, a 25% to 55%, a 25% to 50%, a 25% to 45%, a 25% to 40%, a 25% to 35%, a 25% to 30%, a 30% to 99%, a 30% to 95%, a 30% to 90%, a 30% to 85%, a 30% to 80%, a 30% to 75%, a 30% to 70%, a 30% to 65%, a 30% to 60%, a 30% to 55%, a 30% to 50%, a 30% to 45%, a 30% to 40%, a 30% to 35%, a 35% to 99%, a 35% to 95%, a 35% to 90%, a 35% to 85%, a 35% to 80%, a 35% to 75%, a 35% to 70%, a 35% to 65%, a 35% to 60%, a 35% to 55%, a 35% to 50%, a 35% to 45%, a 35% to 40%, a 40% to 99%, a 40% to 95%, a 40% to 90%, a 40% to 85%, a 40% to 80%, a 40% to 75%, a 40% to 70%, a 40% to 65%, a 40% to 60%, a 40% to 55%, a 40% to 50%, a 40% to 45%, a 45% to 99%, a 45% to 95%, a 45% to 90%, a 45% to 85%, a 45% to 80%, a 45% to 75%, a 45% to 70%, a 45% to 65%, a 45% to 60%, a 45% to 55%, a 45% to 50%, a 50% to 99%, a 50% to 95%, a 50% to 90%, a 50% to 85%, a 50% to 80%, a 50% to 75%, a 50% to 70%, a 50% to 65%, a 50% to 60%, a 50% to 55%, a 55% to 99%, a 55% to 95%, a 55% to 90%, a 55% to 85%, a 55% to 80%, a 55% to 75%, a 55% to 70%, a 55% to 65%, a 55% to 60%, a 60% to 99%, a 60% to 95%, a 60% to 90%, a 60% to 85%, a 60% to 80%, a 60% to 75%, a 60% to 70%, a 60% to 65%, a 65% to 99%, a 65% to 95%, a 65% to 90%, a 65% to 85%, a 65% to 80%, a 65% to 75%, a 65% to 70%, a 70% to 99%, a 70% to 95%, a 70% to 90%, a 70% to 85%, a 70% to 80%, a 70% to 75%, a 75% to 99%, a 75% to 95%, a 75% to 90%, a 75% to 85%, a 75% to 80%, a 80% to 99%, a 80% to 95%, a 80% to 90%, a 80% to 85%, a 85% to 99%, a 85% to 95%, a 85% to 90%, a 90% to 99%, a 90% to 95%, or a 95% to 99% decrease) in the size or the severity of one or more symptoms of an acoustic neuroma, vestibular schwannoma, or neurofibromatosis type II in a mammal as compared to the level of hearing or size of an acoustic neuroma, vestibular schwannoma, or neurofibromatosis type II in the mammal, respectively, before administration of any of the AAV vectors described herein. In some embodiments, a decrease in a VEGF activity can be detected in an in vitro assay.

[0219] In some embodiments, the antibody that specifically binds to a VEGF is bevacizumab (Avastatin®) (SEQ ID NO: 103) or an antigen-binding fragment thereof. Bevacizumab (full size antibody ˜150 kDa) inhibits all isoforms of VEGF-A. Bevacizumab received Food and Drug administration (FDA) approval in 2004 for colon cancer for intravenous (IV) dose of 4.0-7.5 mg/kg at 2-3 weeks (plasmatic half life 21 days), for intravetrial (IVT) dose 1.25 mg in 0.05 mL (half-life 5.6 days). Bevacizumab has a K_{D} for VEGF 165 (VEGF-A) of 58 pM. See, e.g., WO 2017/050825. The leader sequence of bevacizumab is SEQ ID NO: 104, the heavy chain variable domain of bevacizumab is SEQ ID NO: 105, the heavy chain constant region of bevacizumab is SEQ ID NO: 106, the light chain variable domain of devacizumab is SEQ ID NO: 107, and the light chain constant region of bevacizumab is SEQ ID NO: 108. An exemplary cDNA sequence encoding bevacizumab is SEQ ID NO: 109.

[0220] In some embodiments, the antibody that specifically binds to a VEGF is ranibizumab (Lucentis®) (SEQ ID NO: 95), or an antigen-binding fragment thereof. Ranibizumab (˜50 kDa) inhibits all isoforms of VEGF-A. Ranibizumab received FDA approval in 2006 for ocular use for intravenous (IV) dose of 4.0-7.5 mg/kg at 2-3 weeks (plasma half life of 0.5 days), for intravetrial (IVT) dose 0.5 mg in 0.05 mL (half-life of 3.2 days). Ranibizumab has a K_{D} for VEGF 165 (VEGF-A) of 46 pM. See, e.g., WO 2014/178078. The leader sequence of ranibizumab has a sequence of SEQ ID NO: 96, the heavy chain variable domain of ranibizumab has a sequence of SEQ ID NO: 97, the heavy chain constant region of ranibizumab has a sequence of SEQ ID NO: 98, the light chain variable domain of ranibizumab has a sequence of SE QID NO: 100, the light chain contant region of ranibizumab has a sequence of SEQ ID NO: 101. An exemplary cDNA sequence encoding ranibizumab is SEQ ID NO: 102.

[0221] In some embodiments, the antibody that specifically binds to VEGF is sevacizumab (APX003/SIM-BD0801), or an antigen-binding fragment thereof.

[0222] In some embodiments, the antibody or antigen-binding fragment thereof that specifically binds to VEGF is aflibercept (SEQ ID NO: 110). An exemplary cDNA sequence encoding aflibercept is SEQ ID NO: 114.

[0223] In some embodiments of the antibodies that specifically bind to VEGF and antigen-binding fragments thereof described herein, the antibody or antigen-binding fragments thereof includes a variable light chain domain that is or includes a sequence that is at least 80% identical (e.g., at least 82%, at least 84%, at least 86%, at least 88%, at least 90%, at least 92%, at least 94%, at least 96%, at least 98%, or at least 99%) identical to the variable light chain domain of bevacizumab, and/or includes a variable heavy chain domain that is or includes a sequence that is at least 80% identical (e.g., at least 82%, at least 84%, at least 86%, at least 88%, at least 90%, at least 92%, at least 94%, at least 96%, at least 98%, or at least 99%) identical to the variable heavy chain domain of bevacizumab.

[0224] In some embodiments of the antibodies that specifically bind to VEGF and antigen-binding fragments thereof described herein, the antibody or antigen-binding fragments thereof includes a variable light chain domain that is or includes the variable light chain domain of bevacizumab, and/or a variable heavy chain domain that is or includes the variable heavy chain domain of bevacizumab. In some embodiments of the antibodies that specifically bind to VEGF and antigen-binding fragments thereof described herein, the antibody or antigen-binding fragments thereof includes a variable light chain domain that is or includes the sequence of variable light chain domain of bevacizumab, except that it includes one, two, three, four, five, six, seven, eight, nine, ten, eleven, twelve, thirteen, fourteen, or fifteen amino acid substitutions, and/or includes a variable heavy chain domain that is or includes the sequence of variable heavy chain of bevacizumab, except that it includes one, two, three, four, five, six, seven, eight, nine, ten, eleven, twelve, thirteen, fourteen, or fifteen amino acid substitutions. In some embodiments the first antigen-binding domain includes the three CDRs in the light chain variable domain of bevacizumab, and/or the three CDRs in the heavy chain variable domain of bevacizumab.

[0225] In some embodiments of the antibodies that specifically bind to VEGF and antigen-binding fragments thereof described herein, the antibody or antigen-binding fragments thereof includes a variable light chain domain that is or includes a sequence that is at least 80% identical (e.g., at least 82%, at least 84%, at least 86%, at least 88%, at least 90%, at least 92%, at least 94%, at least 96%, at least 98%, or at least 99%) identical to the variable light chain domain of ranibizumab, and/or includes a variable heavy chain domain that is or includes a sequence that is at least 80% identical (e.g., at least 82%, at least 84%, at least 86%, at least 88%, at least 90%, at least 92%, at least 94%, at least 96%, at least 98%, or at least 99%) identical to the variable heavy chain domain of ranibizumab.

[0226] In some embodiments of the antibodies that specifically bind to VEGF and antigen-binding fragments thereof described herein, the antibody or antigen-binding fragments thereof includes a variable light chain domain that is or includes the variable light chain domain of ranibizumab, and/or a variable heavy chain domain that is or includes the variable heavy chain domain of ranibizumab. In some embodiments of the antibodies that specifically bind to VEGF and antigen-binding fragments thereof described herein, the antibody or antigen-binding fragments thereof includes a variable light chain domain that is or includes the sequence of variable light chain domain of ranibizumab, except that it includes one, two, three, four, five, six, seven, eight, nine, ten, eleven, twelve, thirteen, fourteen, or fifteen amino acid substitutions, and/or includes a variable heavy chain domain that is or includes the sequence of variable heavy chain of ranibizumab, except that it includes one, two, three, four, five, six, seven, eight, nine, ten, eleven, twelve, thirteen, fourteen, or fifteen amino acid substitutions. In some embodiments the first antigen-binding domain includes the three CDRs in the light chain variable domain of ranibizumab, and/or the three CDRs in the heavy chain variable domain of ranibizumab.

### Vectors

[0227] The compositions provided herein include at least two (e.g., two, three, four, five, or six) nucleic acid vectors, where: each of the at least two different vectors includes a coding sequence that encodes a different portion of a target protein (e.g., a supporting cell target protein or a hair cell target protein), each of the encoded portions being at least 30 amino acids (e.g., about 30 amino acids to about 800 amino acids, about 30 amino acids to about 750 amino acids, about 30 amino acids to about 700 amino acids, about 30 amino acids to about 650 amino acids, about 30 amino acids to about 600 amino acids, about 30 amino acids to about 550 amino acids, about 30 amino acids to about 500 amino acids, about 30 amino acids to about 450 amino acids, about 30 amino acids to about 400 amino acids, about 30 amino acids to about 350 amino acids, about 30 amino acids to about 300 amino acids, about 30 amino acids to about 250 amino acids, about 30 amino acids to about 200 amino acids, about 30 amino acids to about 150 amino acids, about 30 amino acids to about 100 amino acids, about 30 amino acids to about 50 amino acids, about 50 amino acids to about 800 amino acids, about 50 amino acids to about 750 amino acids, about 50 amino acids to about 700 amino acids, about 50 amino acids to about 650 amino acids, about 50 amino acids to about 600 amino acids, about 50 amino acids to about 550 amino acids, about 50 amino acids to about 500 amino acids, about 50 amino acids to about 450 amino acids, about 50 amino acids to about 400 amino acids, about 50 amino acids to about 350 amino acids, about 50 amino acids to about 300 amino acids, about 50 amino acids to about 250 amino acids, about 50 amino acids to about 200 amino acids, about 50 amino acids to about 150 amino acids, about 50 amino acids to about 100 amino acids, about 100 amino acids to about 1600 amino acids, about 100 amino acids to about 800 amino acids, about 100 amino acids to about 750 amino acids, about 100 amino acids to about 700 amino acids, about 100 amino acids to about 650 amino acids, about 100 amino acids to about 600 amino acids, about 100 amino acids to about 550 amino acids, about 100 amino acids to about 500 amino acids, about 100 amino acids to about 450 amino acids, about 100 amino acids to about 400 amino acids, about 100 amino acids to about 350 amino acids, about 100 amino acids to about 300 amino acids, about 100 amino acids to about 250 amino acids, about 100 amino acids to about 200 amino acids, about 100 amino acids to about 150 amino acids, about 150 amino acids to about 800 amino acids, about 150 amino acids to about 750 amino acids, about 150 amino acids to about 700 amino acids, about 150 amino acids to about 650 amino acids, about 150 amino acids to about 600 amino acids, about 150 amino acids to about 550 amino acids, about 150 amino acids to about 500 amino acids, about 150 amino acids to about 450 amino acids, about 150 amino acids to about 400 amino acids, about 150 amino acids to about 350 amino acids, about 150 amino acids to about 300 amino acids, about 150 amino acids to about 250 amino acids, about 150 amino acids to about 200 amino acids, about 200 amino acids to about 800 amino acids, about 200 amino acids to about 750 amino acids, about 200 amino acids to about 700 amino acids, about 200 amino acids to about 650 amino acids, about 200 amino acids to about 600 amino acids, about 200 amino acids to about 550 amino acids, about 200 amino acids to about 500 amino acids, about 200 amino acids to about 450 amino acids, about 200 amino acids to about 400 amino acids, about 200 amino acids to about 350 amino acids, about 200 amino acids to about 300 amino acids, about 200 amino acids to about 250 amino acids, about 250 amino acids to about 800 amino acids, about 250 amino acids to about 750 amino acids, about 250 amino acids to about 700 amino acids, about 250 amino acids to about 650 amino acids, about 250 amino acids to about 600 amino acids, about 250 amino acids to about 550 amino acids, about 250 amino acids to about 500 amino acids, about 250 amino acids to about 450 amino acids, about 250 amino acids to about 400 amino acids, about 250 amino acids to about 350 amino acids, about 250 amino acids to about 300 amino acids, about 300 amino acids to about 800 amino acids, about 300 amino acids to about 750 amino acids, about 300 amino acids to about 700 amino acids, about 300 amino acids to about 650 amino acids, about 300 amino acids to about 600 amino acids, about 300 amino acids to about 550 amino acids, about 300 amino acids to about 500 amino acids, about 300 amino acids to about 450 amino acids, about 300 amino acids to about 400 amino acids, about 300 amino acids to about 350 amino acids, about 350 amino acids to about 800 amino acids, about 350 amino acids to about 750 amino acids, about 350 amino acids to about 700 amino acids, about 350 amino acids to about 650 amino acids, about 350 amino acids to about 600 amino acids, about 350 amino acids to about 550 amino acids, about 350 amino acids to about 500 amino acids, about 350 amino acids to about 450 amino acids, about 350 amino acids to about 400 amino acids, about 400 amino acids to about 800 amino acids, about 400 amino acids to about 750 amino acids, about 400 amino acids to about 700 amino acids, about 400 amino acids to about 650 amino acids, about 400 amino acids to about 600 amino acids, about 400 amino acids to about 550 amino acids, about 400 amino acids to about 500 amino acids, about 400 amino acids to about 450 amino acids, about 450 amino acids to about 800 amino acids, about 450 amino acids to about 750 amino acids, about 450 amino acids to about 700 amino acids, about 450 amino acids to about 650 amino acids, about 450 amino acids to about 600 amino acids, about 450 amino acids to about 550 amino acids, about 450 amino acids to about 500 amino acids, about 500 amino acids to about 800 amino acids, about 500 amino acids to about 750 amino acids, about 500 amino acids to about 700 amino acids, about 500 amino acids to about 650 amino acids, about 500 amino acids to about 600 amino acids, about 500 amino acids to about 550 amino acids, about 550 amino acids to about 800 amino acids, about 550 amino acids to about 750 amino acids, about 550 amino acids to about 700 amino acids, about 550 amino acids to about 650 amino acids, about 550 amino acids to about 600 amino acids, about 600 amino acids to about 800 amino acids, about 600 amino acids to about 750 amino acids, about 600 amino acids to about 700 amino acids, about 600 amino acids to about 650 amino acids, about 650 amino acids to about 800 amino acids, about 650 amino acids to about 750 amino acids, about 650 amino acids to about 700 amino acids, about 700 amino acids to about 800 amino acids, about 700 amino acids to about 750 amino acids, or about 750 amino acids to about 800 amino acids), where the amino acid sequence of each of the encoded portions may optionally partially overlap with the amino acid sequence of a different one of the encoded portions; no single vector of the at least two different vectors encodes the active target protein (e.g., an active supporting cell target protein (e.g., a full-length supporting cell target protein (e.g., a full-length wildtype supporting cell target protein)) or an active hair cell target protein (e.g., a full-length hair cell target protein (e.g., a full-length wildtype hair cell target protein)); and, when introduced into a primate cell, the at least two different vectors undergo homologous recombination with each other, where the recombined nucleic acid encodes an active target protein (e.g., an active supporting cell target protein (e.g., a full-length supporting cell target protein) or an active hair cell target protein (e.g., a full-length hair cell target protein). In some embodiments, one of the nucleic acid vectors can include a coding sequence that encodes a portion of a target protein (e.g., a supporting cell target protein or a hair cell target protein), where the encoded portion is, e.g., about 30 amino acids to about 800 amino acids, about 30 amino acids to about 750 amino acids, about 30 amino acids to about 700 amino acids, about 30 amino acids to about 650 amino acids, about 30 amino acids to about 600 amino acids, about 30 amino acids to about 550 amino acids, about 30 amino acids to about 500 amino acids, about 30 amino acids to about 450 amino acids, about 30 amino acids to about 400 amino acids, about 30 amino acids to about 350 amino acids, about 30 amino acids to about 300 amino acids, about 30 amino acids to about 250 amino acids, about 30 amino acids to about 200 amino acids, about 30 amino acids to about 150 amino acids, about 30 amino acids to about 100 amino acids, about 30 amino acids to about 50 amino acids, about 50 amino acids to about 800 amino acids, about 50 amino acids to about 750 amino acids, about 50 amino acids to about 700 amino acids, about 50 amino acids to about 650 amino acids, about 50 amino acids to about 600 amino acids, about 50 amino acids to about 550 amino acids, about 50 amino acids to about 500 amino acids, about 50 amino acids to about 450 amino acids, about 50 amino acids to about 400 amino acids, about 50 amino acids to about 350 amino acids, about 50 amino acids to about 300 amino acids, about 50 amino acids to about 250 amino acids, about 50 amino acids to about 200 amino acids, about 50 amino acids to about 150 amino acids, about 50 amino acids to about 100 amino acids, about 100 amino acids to about 1600 amino acids, about 100 amino acids to about 800 amino acids, about 100 amino acids to about 750 amino acids, about 100 amino acids to about 700 amino acids, about 100 amino acids to about 650 amino acids, about 100 amino acids to about 600 amino acids, about 100 amino acids to about 550 amino acids, about 100 amino acids to about 500 amino acids, about 100 amino acids to about 450 amino acids, about 100 amino acids to about 400 amino acids, about 100 amino acids to about 350 amino acids, about 100 amino acids to about 300 amino acids, about 100 amino acids to about 250 amino acids, about 100 amino acids to about 200 amino acids, about 100 amino acids to about 150 amino acids, about 150 amino acids to about 800 amino acids, about 150 amino acids to about 750 amino acids, about 150 amino acids to about 700 amino acids, about 150 amino acids to about 650 amino acids, about 150 amino acids to about 600 amino acids, about 150 amino acids to about 550 amino acids, about 150 amino acids to about 500 amino acids, about 150 amino acids to about 450 amino acids, about 150 amino acids to about 400 amino acids, about 150 amino acids to about 350 amino acids, about 150 amino acids to about 300 amino acids, about 150 amino acids to about 250 amino acids, about 150 amino acids to about 200 amino acids, about 200 amino acids to about 800 amino acids, about 200 amino acids to about 750 amino acids, about 200 amino acids to about 700 amino acids, about 200 amino acids to about 650 amino acids, about 200 amino acids to about 600 amino acids, about 200 amino acids to about 550 amino acids, about 200 amino acids to about 500 amino acids, about 200 amino acids to about 450 amino acids, about 200 amino acids to about 400 amino acids, about 200 amino acids to about 350 amino acids, about 200 amino acids to about 300 amino acids, about 200 amino acids to about 250 amino acids, about 250 amino acids to about 800 amino acids, about 250 amino acids to about 750 amino acids, about 250 amino acids to about 700 amino acids, about 250 amino acids to about 650 amino acids, about 250 amino acids to about 600 amino acids, about 250 amino acids to about 550 amino acids, about 250 amino acids to about 500 amino acids, about 250 amino acids to about 450 amino acids, about 250 amino acids to about 400 amino acids, about 250 amino acids to about 350 amino acids, about 250 amino acids to about 300 amino acids, about 300 amino acids to about 800 amino acids, about 300 amino acids to about 750 amino acids, about 300 amino acids to about 700 amino acids, about 300 amino acids to about 650 amino acids, about 300 amino acids to about 600 amino acids, about 300 amino acids to about 550 amino acids, about 300 amino acids to about 500 amino acids, about 300 amino acids to about 450 amino acids, about 300 amino acids to about 400 amino acids, about 300 amino acids to about 350 amino acids, about 350 amino acids to about 800 amino acids, about 350 amino acids to about 750 amino acids, about 350 amino acids to about 700 amino acids, about 350 amino acids to about 650 amino acids, about 350 amino acids to about 600 amino acids, about 350 amino acids to about 550 amino acids, about 350 amino acids to about 500 amino acids, about 350 amino acids to about 450 amino acids, about 350 amino acids to about 400 amino acids, about 400 amino acids to about 800 amino acids, about 400 amino acids to about 750 amino acids, about 400 amino acids to about 700 amino acids, about 400 amino acids to about 650 amino acids, about 400 amino acids to about 600 amino acids, about 400 amino acids to about 550 amino acids, about 400 amino acids to about 500 amino acids, about 400 amino acids to about 450 amino acids, about 450 amino acids to about 800 amino acids, about 450 amino acids to about 750 amino acids, about 450 amino acids to about 700 amino acids, about 450 amino acids to about 650 amino acids, about 450 amino acids to about 600 amino acids, about 450 amino acids to about 550 amino acids, about 450 amino acids to about 500 amino acids, about 500 amino acids to about 800 amino acids, about 500 amino acids to about 750 amino acids, about 500 amino acids to about 700 amino acids, about 500 amino acids to about 650 amino acids, about 500 amino acids to about 600 amino acids, about 500 amino acids to about 550 amino acids, about 550 amino acids to about 800 amino acids, about 550 amino acids to about 750 amino acids, about 550 amino acids to about 700 amino acids, about 550 amino acids to about 650 amino acids, about 550 amino acids to about 600 amino acids, about 600 amino acids to about 800 amino acids, about 600 amino acids to about 750 amino acids, about 600 amino acids to about 700 amino acids, about 600 amino acids to about 650 amino acids, about 650 amino acids to about 800 amino acids, about 650 amino acids to about 750 amino acids, about 650 amino acids to about 700 amino acids, about 700 amino acids to about 800 amino acids, about 700 amino acids to about 750 amino acids, or about 750 amino acids to about 800 amino acids in length.

[0228] In some embodiments of these compositions, at least one of the coding sequences includes a nucleotide sequence spanning two neighboring exons of target genomic DNA (e.g., supporting cell target genomic DNA or hair cell target genomic DNA), and lacks the intronic sequence that naturally occurs between the two neighboring exons.

[0229] In some embodiments, the amino acid sequence of none of the encoded portions overlaps even in part with the amino acid sequence of a different one of the encoded portions. In some embodiments, the amino acid sequence of one or more of the encoded portions partially overlaps with the amino acid sequence of a different one of the encoded portions. In some embodiments, the amino acid sequence of each of the encoded portions partially overlaps with the amino acid sequence of a different one of the encoded portions.

[0230] In some embodiments, the overlapping amino acid sequence is between about 30 amino acid residues to about 800 amino acids (e.g., or any of the subranges of this range described herein) in length.

[0231] In some examples, the vectors include two different vectors, each of which includes a different segment of an intron, where the intron includes the nucleotide sequence of an intron that is present in a target genomic DNA (e.g., a supporting cell target genomic DNA (e.g., SLC26A4 genomic DNA or a GJB2 genomic DNA) (e.g., any of the exemplary introns in SEQ ID NO: 3 described herein) or a hair cell target genomic DNA (e.g., an OTOF genomic DNA, a TRIOBP genomic DNA, a PJVK genomic DNA, a NDP genomic DNA, a CLRN1 genomic DNA, a TMC1 genomic DNA, a VEGF genomic DNA, a HSPA1A genomic DNA, or a STRC genomic DNA (e.g., any of the exemplary introns in SEQ ID NO: 19, SEQ ID NO: 22, SEQ ID NO: 33, SEQ ID NO: 37, SEQ ID NO: 47, SEQ ID NO: 50, SEQ ID NO: 61, SEQ ID NO: 71 or SEQ ID NO: 80 described herein), and where the two different segments overlap in sequence by at least 100 nucleotides (e.g., about 100 nucleotides to about 3,000 nucleotides, about 100 nucleotides to about 2,500 nucleotides, about 100 nucleotides to about 2,000 nucleotides, about 100 nucleotides to about 1,500 nucleotides, about 100 nucleotides to about 1,000 nucleotides, about 100 nucleotides to about 800 nucleotides, about 100 nucleotides to about 600 nucleotides, about 100 nucleotides to about 400 nucleotides, about 100 nucleotides to about 200 nucleotides, about 200 nucleotides to about 3,000 nucleotides, about 200 nucleotides to about 2,500 nucleotides, about 200 nucleotides to about 2,000 nucleotides, about 200 nucleotides to about 1,500 nucleotides, about 200 nucleotides to about 1,000 nucleotides, about 200 nucleotides to about 800 nucleotides, about 200 nucleotides to about 600 nucleotides, about 200 nucleotides to about 400 nucleotides, about 400 nucleotides to about 3,000 nucleotides, about 400 nucleotides to about 2,500 nucleotides, about 400 nucleotides to about 2,000 nucleotides, about 400 nucleotides to about 1,500 nucleotides, about 400 nucleotides to about 1,000 nucleotides, about 400 nucleotides to about 800 nucleotides, about 400 nucleotides to about 600 nucleotides, about 600 nucleotides to about 3,000 nucleotides, about 600 nucleotides to about 2,500 nucleotides, about 600 nucleotides to about 2,000 nucleotides, about 600 nucleotides to about 1,500 nucleotides, about 600 nucleotides to about 1,000 nucleotides, about 600 nucleotides to about 800 nucleotides, about 800 nucleotides to about 3,000 nucleotides, about 800 nucleotides to about 2,500 nucleotides, about 800 nucleotides to about 2,000 nucleotides, about 800 nucleotides to about 1,500 nucleotides, about 800 nucleotides to about 1,000 nucleotides, about 1,000 nucleotides to about 3,000 nucleotides, about 1,000 nucleotides to about 2,500 nucleotides, about 1,000 nucleotides to about 2,000 nucleotides, about 1,000 nucleotides to about 1,500 nucleotides, about 1,500 nucleotides to about 3,000 nucleotides, about 1,500 nucleotides to about 2,500 nucleotides, about 1,500 nucleotides to about 2,000 nucleotides, about 2,000 nucleotides to about 3,000 nucleotides, about 2,000 nucleotides to about 2,500 nucleotides, or about 2,500 nucleotides to about 3,000 nucleotides), in length.

[0232] The overlapping nucleotide sequence in any two of the different vectors can include part or all of one or more exons of a target gene (e.g., a supporting cell target gene (e.g., a SLC26A4 gene or a GJB2 gene) (e.g., any one or more of the exemplary exons in SEQ ID NO: 3 described herein) or a hair cell target gene (e.g., an OTOF gene, a TRIOBP gene, a PJVK gene, a NDP gene, a CLRN1 gene, a TMC1 gene, or a STRC gene) (e.g., any one or more of the exemplary exons in SEQ ID NO: 19, SEQ ID NO: 22, SEQ ID NO: 33, SEQ ID NO: 37, SEQ ID NO: 47, SEQ ID NO: 50, SEQ ID NO: 63, SEQ ID NO: 71 or SEQ ID NO: 80 described herein).

[0233] In some embodiments, the number of different vectors in the composition is two, three, four, or five. In compositions where the number of different vectors in the composition is two, the first of the two different vectors can include a coding sequence that encodes an N-terminal portion of the target protein (e.g., an N-terminal portion of the supporting cell target protein or an N-terminal portion of the hair cell target protein). In some examples, the N-terminal portion of the target gene (e.g., the N-terminal portion of the supporting cell target gene or the N-terminal portion of the hair cell target gene) is between about 30 amino acids to about 800 amino acids (e.g., between about 30 amino acids to about 790 amino acids, between about 30 amino acids to about 780 amino acids, between about 30 amino acids to about 770 amino acids, between about 30 amino acids to about 760 amino acids, between about 30 amino acids to about 750 amino acids, between about 30 amino acids to about 740 amino acids, between about 30 amino acids to about 730 amino acids, between about 30 amino acids to about 720 amino acids, between about 30 amino acids to about 710 amino acids, between about 30 amino acids to about 700 amino acids, between about 30 amino acids to about 690 amino acids, between about 30 amino acids to about 680 amino acids, between 30 amino acids to about 670 amino acids, between about 30 amino acids to about 660 amino acids, between about 30 amino acids to about 650 amino acids, between about 30 amino acids to about 640 amino acids, between about 30 amino acids to about 630 amino acids, between about 30 amino acids to about 620 amino acids, between about 30 amino acids to about 610 amino acids, between about 30 amino acids to about 600 amino acids, between about 30 amino acids to about 590 amino acids, between about 30 amino acids to about 580 amino acids, between about 30 amino acids to about 570 amino acids, between about 30 amino acids to about 560 amino acids, between about 30 amino acids to about 550 amino acids, between about 30 amino acids to about 540 amino acids, between about 30 amino acids to about 530 amino acids, between about 30 amino acids to about 520 amino acids, between about 30 amino acids to about 510 amino acids, between about 30 amino acids to about 500 amino acids, between about 30 amino acids to about 490 amino acids, between about 30 amino acids to about 480 amino acids, between about 30 amino acids to about 470 amino acids, between about 30 amino acids to about 460 amino acids, between about 30 amino acids to about 450 amino acids, between about 30 amino acids to about 440 amino acids, between about 30 amino acids to about 430 amino acids, between about 30 amino acids to about 420 amino acids, between about 30 amino acids to about 410 amino acids, between about 30 amino acids to about 400 amino acids, between about 30 amino acids to about 390 amino acids, between about 30 amino acids to about 380 amino acids, between about 30 amino acids to about 370 amino acids, between about 30 amino acids to about 360 amino acids, between about 30 amino acids to about 350 amino acids, between about 30 amino acids to about 340 amino acids, between about 30 amino acids to about 330 amino acids, between about 30 amino acids to about 320 amino acids, between about 30 amino acids to about 310 amino acids, between about 30 amino acids to about 300 amino acids, between about 30 amino acids to about 290 amino acids, between about 30 amino acids to about 280 amino acids, between about 30 amino acids to about 270 amino acids, between about 30 amino acids to about 260 amino acids, between about 30 amino acids to about 250 amino acids, between about 30 amino acids to about 240 amino acids, between about 30 amino acids to about 230 amino acids, between about 30 amino acids to about 220 amino acids, between about 30 amino acids to about 210 amino acids, between about 30 amino acids to about 200 amino acids, between about 30 amino acids to about 190 amino acids, between about 30 amino acids to about 180 amino acids, between about 30 amino acids to about 170 amino acids, between about 30 amino acids to about 160 amino acids, between about 30 amino acids to about 150 amino acids, between about 30 amino acids to about 140 amino acids, between about 30 amino acids to about 130 amino acids, between about 30 amino acids to about 120 amino acids, between about 30 amino acids to about 110 amino acids, between about 30 amino acids to about 100 amino acids, between about 30 amino acids to about 90 amino acids, between about 30 amino acids to about 80 amino acids, between about 30 amino acids to about 70 amino acids, between about 30 amino acids to about 60 amino acids, between about 30 amino acids to about 50 amino acids, between about 30 amino acids to about 40 amino acids, between about 50 amino acids to about 800 amino acids, between about 50 amino acids to about 790 amino acids, between about 50 amino acids to about 780 amino acids, between about 50 amino acids to about 770 amino acids, between about 50 amino acids to about 760 amino acids, between about 50 amino acids to about 750 amino acids, between about 50 amino acids to about 740 amino acids, between about 50 amino acids to about 730 amino acids, between about 50 amino acids to about 720 amino acids, between about 50 amino acids to about 710 amino acids, between about 50 amino acids to about 700 amino acids, between about 50 amino acids to about 690 amino acids, between about 50 amino acids to about 680 amino acids, between 30 amino acids to about 670 amino acids, between about 50 amino acids to about 660 amino acids, between about 50 amino acids to about 650 amino acids, between about 50 amino acids to about 640 amino acids, between about 30 amino acids to about 630 amino acids, between about 50 amino acids to about 620 amino acids, between about 50 amino acids to about 610 amino acids, between about 50 amino acids to about 600 amino acids, between about 50 amino acids to about 590 amino acids, between about 50 amino acids to about 580 amino acids, between about 50 amino acids to about 570 amino acids, between about 50 amino acids to about 560 amino acids, between about 50 amino acids to about 550 amino acids, between about 50 amino acids to about 540 amino acids, between about 50 amino acids to about 530 amino acids, between about 50 amino acids to about 520 amino acids, between about 50 amino acids to about 510 amino acids, between about 50 amino acids to about 500 amino acids, between about 50 amino acids to about 490 amino acids, between about 50 amino acids to about 480 amino acids, between about 50 amino acids to about 470 amino acids, between about 50 amino acids to about 460 amino acids, between about 50 amino acids to about 450 amino acids, between about 50 amino acids to about 440 amino acids, between about 50 amino acids to about 430 amino acids, between about 50 amino acids to about 420 amino acids, between about 50 amino acids to about 410 amino acids, between about 50 amino acids to about 400 amino acids, between about 50 amino acids to about 390 amino acids, between about 50 amino acids to about 380 amino acids, between about 50 amino acids to about 370 amino acids, between about 50 amino acids to about 360 amino acids, between about 50 amino acids to about 350 amino acids, between about 50 amino acids to about 340 amino acids, between about 50 amino acids to about 330 amino acids, between about 50 amino acids to about 320 amino acids, between about 50 amino acids to about 310 amino acids, between about 50 amino acids to about 300 amino acids, between about 50 amino acids to about 290 amino acids, between about 50 amino acids to about 280 amino acids, between about 50 amino acids to about 270 amino acids, between about 50 amino acids to about 260 amino acids, between about 50 amino acids to about 250 amino acids, between about 50 amino acids to about 240 amino acids, between about 50 amino acids to about 230 amino acids, between about 50 amino acids to about 220 amino acids, between about 50 amino acids to about 210 amino acids, between about 50 amino acids to about 200 amino acids, between about 50 amino acids to about 190 amino acids, between about 50 amino acids to about 180 amino acids, between about 50 amino acids to about 170 amino acids, between about 50 amino acids to about 160 amino acids, between about 50 amino acids to about 150 amino acids, between about 50 amino acids to about 140 amino acids, between about 50 amino acids to about 130 amino acids, between about 50 amino acids to about 120 amino acids, between about 50 amino acids to about 110 amino acids, between about 50 amino acids to about 100 amino acids, between about 50 amino acids to about 90 amino acids, between about 50 amino acids to about 80 amino acids, between about 50 amino acids to about 70 amino acids, between about 50 amino acids to about 60 amino acids, between about 80 amino acids to about 800 amino acids, between about 80 amino acids to about 790 amino acids, between about 80 amino acids to about 780 amino acids, between about 80 amino acids to about 770 amino acids, between about 80 amino acids to about 760 amino acids, between about 80 amino acids to about 750 amino acids, between about 80 amino acids to about 740 amino acids, between about 80 amino acids to about 730 amino acids, between about 80 amino acids to about 720 amino acids, between about 80 amino acids to about 710 amino acids, between about 80 amino acids to about 700 amino acids, between about 80 amino acids to about 690 amino acids, between about 80 amino acids to about 680 amino acids, between 30 amino acids to about 670 amino acids, between about 80 amino acids to about 660 amino acids, between about 80 amino acids to about 650 amino acids, between about 80 amino acids to about 640 amino acids, between about 30 amino acids to about 630 amino acids, between about 80 amino acids to about 620 amino acids, between about 80 amino acids to about 610 amino acids, between about 80 amino acids to about 600 amino acids, between about 80 amino acids to about 590 amino acids, between about 80 amino acids to about 580 amino acids, between about 80 amino acids to about 570 amino acids, between about 80 amino acids to about 560 amino acids, between about 80 amino acids to about 550 amino acids, between about 80 amino acids to about 540 amino acids, between about 80 amino acids to about 530 amino acids, between about 80 amino acids to about 520 amino acids, between about 80 amino acids to about 510 amino acids, between about 80 amino acids to about 500 amino acids, between about 80 amino acids to about 490 amino acids, between about 80 amino acids to about 480 amino acids, between about 80 amino acids to about 470 amino acids, between about 80 amino acids to about 460 amino acids, between about 80 amino acids to about 450 amino acids, between about 80 amino acids to about 440 amino acids, between about 80 amino acids to about 430 amino acids, between about 80 amino acids to about 420 amino acids, between about 80 amino acids to about 410 amino acids, between about 80 amino acids to about 400 amino acids, between about 80 amino acids to about 390 amino acids, between about 80 amino acids to about 380 amino acids, between about 80 amino acids to about 370 amino acids, between about 80 amino acids to about 360 amino acids, between about 80 amino acids to about 350 amino acids, between about 80 amino acids to about 340 amino acids, between about 80 amino acids to about 330 amino acids, between about 80 amino acids to about 320 amino acids, between about 80 amino acids to about 310 amino acids, between about 80 amino acids to about 300 amino acids, between about 80 amino acids to about 290 amino acids, between about 80 amino acids to about 280 amino acids, between about 80 amino acids to about 270 amino acids, between about 80 amino acids to about 260 amino acids, between about 80 amino acids to about 250 amino acids, between about 80 amino acids to about 240 amino acids, between about 80 amino acids to about 230 amino acids, between about 80 amino acids to about 220 amino acids, between about 80 amino acids to about 210 amino acids, between about 80 amino acids to about 200 amino acids, between about 80 amino acids to about 190 amino acids, between about 80 amino acids to about 180 amino acids, between about 80 amino acids to about 170 amino acids, between about 80 amino acids to about 160 amino acids, between about 80 amino acids to about 150 amino acids, between about 80 amino acids to about 140 amino acids, between about 80 amino acids to about 130 amino acids, between about 80 amino acids to about 120 amino acids, between about 80 amino acids to about 110 amino acids, between about 80 amino acids to about 100 amino acids, between about 100 amino acids to about 800 amino acids, between about 100 amino acids to about 790 amino acids, between about 100 amino acids to about 780 amino acids, between about 100 amino acids to about 770 amino acids, between about 100 amino acids to about 760 amino acids, between about 100 amino acids to about 750 amino acids, between about 100 amino acids to about 740 amino acids, between about 100 amino acids to about 730 amino acids, between about 100 amino acids to about 720 amino acids, between about 100 amino acids to about 710 amino acids, between about 100 amino acids to about 700 amino acids, between about 100 amino acids to about 690 amino acids, between about 100 amino acids to about 680 amino acids, between 30 amino acids to about 670 amino acids, between about 100 amino acids to about 660 amino acids, between about 100 amino acids to about 650 amino acids, between about 100 amino acids to about 640 amino acids, between about 30 amino acids to about 630 amino acids, between about 100 amino acids to about 620 amino acids, between about 100 amino acids to about 610 amino acids, between about 100 amino acids to about 600 amino acids, between about 100 amino acids to about 590 amino acids, between about 100 amino acids to about 580 amino acids, between about 100 amino acids to about 570 amino acids, between about 100 amino acids to about 560 amino acids, between about 100 amino acids to about 550 amino acids, between about 100 amino acids to about 540 amino acids, between about 100 amino acids to about 530 amino acids, between about 100 amino acids to about 520 amino acids, between about 100 amino acids to about 510 amino acids, between about 100 amino acids to about 500 amino acids, between about 100 amino acids to about 490 amino acids, between about 100 amino acids to about 480 amino acids, between about 100 amino acids to about 470 amino acids, between about 100 amino acids to about 460 amino acids, between about 100 amino acids to about 450 amino acids, between about 100 amino acids to about 440 amino acids, between about 100 amino acids to about 430 amino acids, between about 100 amino acids to about 420 amino acids, between about 100 amino acids to about 410 amino acids, between about 100 amino acids to about 400 amino acids, between about 100 amino acids to about 390 amino acids, between about 100 amino acids to about 380 amino acids, between about 100 amino acids to about 370 amino acids, between about 100 amino acids to about 360 amino acids, between about 100 amino acids to about 350 amino acids, between about 100 amino acids to about 340 amino acids, between about 100 amino acids to about 330 amino acids, between about 100 amino acids to about 320 amino acids, between about 100 amino acids to about 310 amino acids, between about 100 amino acids to about 300 amino acids, between about 100 amino acids to about 290 amino acids, between about 100 amino acids to about 280 amino acids, between about 100 amino acids to about 270 amino acids, between about 100 amino acids to about 260 amino acids, between about 100 amino acids to about 250 amino acids, between about 100 amino acids to about 240 amino acids, between about 100 amino acids to about 230 amino acids, between about 100 amino acids to about 220 amino acids, between about 100 amino acids to about 210 amino acids, between about 100 amino acids to about 200 amino acids, between about 100 amino acids to about 190 amino acids, between about 100 amino acids to about 180 amino acids, between about 100 amino acids to about 170 amino acids, between about 100 amino acids to about 160 amino acids, between about 100 amino acids to about 150 amino acids, between about 100 amino acids to about 140 amino acids, between about 100 amino acids to about 130 amino acids, between about 100 amino acids to about 120 amino acids, between about 100 amino acids to about 110 amino acids, between about 120 amino acids to about 800 amino acids, between about 120 amino acids to about 790 amino acids, between about 120 amino acids to about 780 amino acids, between about 120 amino acids to about 770 amino acids, between about 120 amino acids to about 760 amino acids, between about 120 amino acids to about 750 amino acids, between about 120 amino acids to about 740 amino acids, between about 120 amino acids to about 730 amino acids, between about 120 amino acids to about 720 amino acids, between about 120 amino acids to about 710 amino acids, between about 120 amino acids to about 700 amino acids, between about 120 amino acids to about 690 amino acids, between about 120 amino acids to about 680 amino acids, between 30 amino acids to about 670 amino acids, between about 120 amino acids to about 660 amino acids, between about 120 amino acids to about 650 amino acids, between about 120 amino acids to about 640 amino acids, between about 30 amino acids to about 630 amino acids, between about 120 amino acids to about 620 amino acids, between about 120 amino acids to about 610 amino acids, between about 120 amino acids to about 600 amino acids, between about 120 amino acids to about 590 amino acids, between about 120 amino acids to about 580 amino acids, between about 120 amino acids to about 570 amino acids, between about 120 amino acids to about 560 amino acids, between about 120 amino acids to about 550 amino acids, between about 120 amino acids to about 540 amino acids, between about 120 amino acids to about 530 amino acids, between about 120 amino acids to about 520 amino acids, between about 120 amino acids to about 510 amino acids, between about 120 amino acids to about 500 amino acids, between about 120 amino acids to about 490 amino acids, between about 120 amino acids to about 480 amino acids, between about 120 amino acids to about 470 amino acids, between about 120 amino acids to about 460 amino acids, between about 120 amino acids to about 450 amino acids, between about 120 amino acids to about 440 amino acids, between about 120 amino acids to about 430 amino acids, between about 120 amino acids to about 420 amino acids, between about 120 amino acids to about 410 amino acids, between about 120 amino acids to about 400 amino acids, between about 120 amino acids to about 390 amino acids, between about 120 amino acids to about 380 amino acids, between about 120 amino acids to about 370 amino acids, between about 120 amino acids to about 360 amino acids, between about 120 amino acids to about 350 amino acids, between about 120 amino acids to about 340 amino acids, between about 120 amino acids to about 330 amino acids, between about 120 amino acids to about 320 amino acids, between about 120 amino acids to about 310 amino acids, between about 120 amino acids to about 300 amino acids, between about 120 amino acids to about 290 amino acids, between about 120 amino acids to about 280 amino acids, between about 120 amino acids to about 270 amino acids, between about 120 amino acids to about 260 amino acids, between about 120 amino acids to about 250 amino acids, between about 120 amino acids to about 240 amino acids, between about 120 amino acids to about 230 amino acids, between about 120 amino acids to about 220 amino acids, between about 120 amino acids to about 210 amino acids, between about 120 amino acids to about 200 amino acids, between about 120 amino acids to about 190 amino acids, between about 120 amino acids to about 180 amino acids, between about 120 amino acids to about 170 amino acids, between about 120 amino acids to about 160 amino acids, between about 120 amino acids to about 150 amino acids, between about 120 amino acids to about 140 amino acids, between about 120 amino acids to about 130 amino acids, between about 150 amino acids to about 800 amino acids, between about 150 amino acids to about 790 amino acids, between about 150 amino acids to about 780 amino acids, between about 150 amino acids to about 770 amino acids, between about 150 amino acids to about 760 amino acids, between about 150 amino acids to about 750 amino acids, between about 150 amino acids to about 740 amino acids, between about 150 amino acids to about 730 amino acids, between about 150 amino acids to about 720 amino acids, between about 150 amino acids to about 710 amino acids, between about 150 amino acids to about 700 amino acids, between about 150 amino acids to about 690 amino acids, between about 150 amino acids to about 680 amino acids, between 30 amino acids to about 670 amino acids, between about 150 amino acids to about 660 amino acids, between about 150 amino acids to about 650 amino acids, between about 150 amino acids to about 640 amino acids, between about 30 amino acids to about 630 amino acids, between about 150 amino acids to about 620 amino acids, between about 150 amino acids to about 610 amino acids, between about 150 amino acids to about 600 amino acids, between about 150 amino acids to about 590 amino acids, between about 150 amino acids to about 580 amino acids, between about 150 amino acids to about 570 amino acids, between about 150 amino acids to about 560 amino acids, between about 150 amino acids to about 550 amino acids, between about 150 amino acids to about 540 amino acids, between about 150 amino acids to about 530 amino acids, between about 150 amino acids to about 520 amino acids, between about 150 amino acids to about 510 amino acids, between about 150 amino acids to about 500 amino acids, between about 150 amino acids to about 490 amino acids, between about 150 amino acids to about 480 amino acids, between about 150 amino acids to about 470 amino acids, between about 150 amino acids to about 460 amino acids, between about 150 amino acids to about 450 amino acids, between about 150 amino acids to about 440 amino acids, between about 150 amino acids to about 430 amino acids, between about 150 amino acids to about 420 amino acids, between about 150 amino acids to about 410 amino acids, between about 150 amino acids to about 400 amino acids, between about 150 amino acids to about 390 amino acids, between about 150 amino acids to about 380 amino acids, between about 150 amino acids to about 370 amino acids, between about 150 amino acids to about 360 amino acids, between about 150 amino acids to about 350 amino acids, between about 150 amino acids to about 340 amino acids, between about 150 amino acids to about 330 amino acids, between about 150 amino acids to about 320 amino acids, between about 150 amino acids to about 310 amino acids, between about 150 amino acids to about 300 amino acids, between about 150 amino acids to about 290 amino acids, between about 150 amino acids to about 280 amino acids, between about 150 amino acids to about 270 amino acids, between about 150 amino acids to about 260 amino acids, between about 150 amino acids to about 250 amino acids, between about 150 amino acids to about 240 amino acids, between about 150 amino acids to about 230 amino acids, between about 150 amino acids to about 220 amino acids, between about 150 amino acids to about 210 amino acids, between about 150 amino acids to about 200 amino acids, between about 150 amino acids to about 190 amino acids, between about 150 amino acids to about 180 amino acids, between about 150 amino acids to about 170 amino acids, between about 150 amino acids to about 160 amino acids, between about 180 amino acids to about 800 amino acids, between about 180 amino acids to about 790 amino acids, between about 180 amino acids to about 780 amino acids, between about 180 amino acids to about 770 amino acids, between about 180 amino acids to about 760 amino acids, between about 180 amino acids to about 750 amino acids, between about 180 amino acids to about 740 amino acids, between about 180 amino acids to about 730 amino acids, between about 180 amino acids to about 720 amino acids, between about 180 amino acids to about 710 amino acids, between about 180 amino acids to about 700 amino acids, between about 180 amino acids to about 690 amino acids, between about 180 amino acids to about 680 amino acids, between 30 amino acids to about 670 amino acids, between about 180 amino acids to about 660 amino acids, between about 180 amino acids to about 650 amino acids, between about 180 amino acids to about 640 amino acids, between about 30 amino acids to about 630 amino acids, between about 180 amino acids to about 620 amino acids, between about 180 amino acids to about 610 amino acids, between about 180 amino acids to about 600 amino acids, between about 180 amino acids to about 590 amino acids, between about 180 amino acids to about 580 amino acids, between about 180 amino acids to about 570 amino acids, between about 180 amino acids to about 560 amino acids, between about 180 amino acids to about 550 amino acids, between about 180 amino acids to about 540 amino acids, between about 180 amino acids to about 530 amino acids, between about 180 amino acids to about 520 amino acids, between about 180 amino acids to about 510 amino acids, between about 180 amino acids to about 500 amino acids, between about 180 amino acids to about 490 amino acids, between about 180 amino acids to about 480 amino acids, between about 180 amino acids to about 470 amino acids, between about 180 amino acids to about 460 amino acids, between about 180 amino acids to about 450 amino acids, between about 180 amino acids to about 440 amino acids, between about 180 amino acids to about 430 amino acids, between about 180 amino acids to about 420 amino acids, between about 180 amino acids to about 410 amino acids, between about 180 amino acids to about 400 amino acids, between about 180 amino acids to about 390 amino acids, between about 180 amino acids to about 380 amino acids, between about 180 amino acids to about 370 amino acids, between about 180 amino acids to about 360 amino acids, between about 180 amino acids to about 350 amino acids, between about 180 amino acids to about 340 amino acids, between about 180 amino acids to about 330 amino acids, between about 180 amino acids to about 320 amino acids, between about 180 amino acids to about 310 amino acids, between about 180 amino acids to about 300 amino acids, between about 180 amino acids to about 290 amino acids, between about 180 amino acids to about 280 amino acids, between about 180 amino acids to about 270 amino acids, between about 180 amino acids to about 260 amino acids, between about 180 amino acids to about 250 amino acids, between about 180 amino acids to about 240 amino acids, between about 180 amino acids to about 230 amino acids, between about 180 amino acids to about 220 amino acids, between about 180 amino acids to about 210 amino acids, between about 180 amino acids to about 200 amino acids, between about 180 amino acids to about 190 amino acids, between about 200 amino acids to about 800 amino acids, between about 200 amino acids to about 790 amino acids, between about 200 amino acids to about 780 amino acids, between about 200 amino acids to about 770 amino acids, between about 200 amino acids to about 760 amino acids, between about 200 amino acids to about 750 amino acids, between about 200 amino acids to about 740 amino acids, between about 200 amino acids to about 730 amino acids, between about 200 amino acids to about 720 amino acids, between about 200 amino acids to about 710 amino acids, between about 200 amino acids to about 700 amino acids, between about 200 amino acids to about 690 amino acids, between about 200 amino acids to about 680 amino acids, between 30 amino acids to about 670 amino acids, between about 200 amino acids to about 660 amino acids, between about 200 amino acids to about 650 amino acids, between about 200 amino acids to about 640 amino acids, between about 30 amino acids to about 630 amino acids, between about 200 amino acids to about 620 amino acids, between about 200 amino acids to about 610 amino acids, between about 200 amino acids to about 600 amino acids, between about 200 amino acids to about 590 amino acids, between about 200 amino acids to about 580 amino acids, between about 200 amino acids to about 570 amino acids, between about 200 amino acids to about 560 amino acids, between about 200 amino acids to about 550 amino acids, between about 200 amino acids to about 540 amino acids, between about 200 amino acids to about 530 amino acids, between about 200 amino acids to about 520 amino acids, between about 200 amino acids to about 510 amino acids, between about 200 amino acids to about 500 amino acids, between about 200 amino acids to about 490 amino acids, between about 200 amino acids to about 480 amino acids, between about 200 amino acids to about 470 amino acids, between about 200 amino acids to about 460 amino acids, between about 200 amino acids to about 450 amino acids, between about 200 amino acids to about 440 amino acids, between about 200 amino acids to about 430 amino acids, between about 200 amino acids to about 420 amino acids, between about 200 amino acids to about 410 amino acids, between about 200 amino acids to about 400 amino acids, between about 200 amino acids to about 390 amino acids, between about 200 amino acids to about 380 amino acids, between about 200 amino acids to about 370 amino acids, between about 200 amino acids to about 360 amino acids, between about 200 amino acids to about 350 amino acids, between about 200 amino acids to about 340 amino acids, between about 200 amino acids to about 330 amino acids, between about 200 amino acids to about 320 amino acids, between about 200 amino acids to about 310 amino acids, between about 200 amino acids to about 300 amino acids, between about 200 amino acids to about 290 amino acids, between about 200 amino acids to about 280 amino acids, between about 200 amino acids to about 270 amino acids, between about 200 amino acids to about 260 amino acids, between about 200 amino acids to about 250 amino acids, between about 200 amino acids to about 240 amino acids, between about 200 amino acids to about 230 amino acids, between about 200 amino acids to about 220 amino acids, between about 200 amino acids to about 210 amino acids, between about 250 amino acids to about 800 amino acids, between about 250 amino acids to about 790 amino acids, between about 250 amino acids to about 780 amino acids, between about 250 amino acids to about 770 amino acids, between about 250 amino acids to about 760 amino acids, between about 250 amino acids to about 750 amino acids, between about 250 amino acids to about 740 amino acids, between about 250 amino acids to about 730 amino acids, between about 250 amino acids to about 720 amino acids, between about 250 amino acids to about 710 amino acids, between about 250 amino acids to about 700 amino acids, between about 250 amino acids to about 690 amino acids, between about 250 amino acids to about 680 amino acids, between 30 amino acids to about 670 amino acids, between about 250 amino acids to about 660 amino acids, between about 250 amino acids to about 650 amino acids, between about 250 amino acids to about 640 amino acids, between about 30 amino acids to about 630 amino acids, between about 250 amino acids to about 620 amino acids, between about 250 amino acids to about 610 amino acids, between about 250 amino acids to about 600 amino acids, between about 250 amino acids to about 590 amino acids, between about 250 amino acids to about 580 amino acids, between about 250 amino acids to about 570 amino acids, between about 250 amino acids to about 560 amino acids, between about 250 amino acids to about 550 amino acids, between about 250 amino acids to about 540 amino acids, between about 250 amino acids to about 530 amino acids, between about 250 amino acids to about 520 amino acids, between about 250 amino acids to about 510 amino acids, between about 250 amino acids to about 500 amino acids, between about 250 amino acids to about 490 amino acids, between about 250 amino acids to about 480 amino acids, between about 250 amino acids to about 470 amino acids, between about 250 amino acids to about 460 amino acids, between about 250 amino acids to about 450 amino acids, between about 250 amino acids to about 440 amino acids, between about 250 amino acids to about 430 amino acids, between about 250 amino acids to about 420 amino acids, between about 250 amino acids to about 410 amino acids, between about 250 amino acids to about 400 amino acids, between about 250 amino acids to about 390 amino acids, between about 250 amino acids to about 380 amino acids, between about 250 amino acids to about 370 amino acids, between about 250 amino acids to about 360 amino acids, between about 250 amino acids to about 350 amino acids, between about 250 amino acids to about 340 amino acids, between about 250 amino acids to about 330 amino acids, between about 250 amino acids to about 320 amino acids, between about 250 amino acids to about 310 amino acids, between about 250 amino acids to about 300 amino acids, between about 250 amino acids to about 290 amino acids, between about 250 amino acids to about 280 amino acids, between about 250 amino acids to about 270 amino acids, between about 250 amino acids to about 260 amino acids, between about 280 amino acids to about 800 amino acids, between about 280 amino acids to about 790 amino acids, between about 280 amino acids to about 780 amino acids, between about 280 amino acids to about 770 amino acids, between about 280 amino acids to about 760 amino acids, between about 280 amino acids to about 750 amino acids, between about 280 amino acids to about 740 amino acids, between about 280 amino acids to about 730 amino acids, between about 280 amino acids to about 720 amino acids, between about 280 amino acids to about 710 amino acids, between about 280 amino acids to about 700 amino acids, between about 280 amino acids to about 690 amino acids, between about 280 amino acids to about 680 amino acids, between 30 amino acids to about 670 amino acids, between about 280 amino acids to about 660 amino acids, between about 280 amino acids to about 650 amino acids, between about 280 amino acids to about 640 amino acids, between about 30 amino acids to about 630 amino acids, between about 280 amino acids to about 620 amino acids, between about 280 amino acids to about 610 amino acids, between about 280 amino acids to about 600 amino acids, between about 280 amino acids to about 590 amino acids, between about 280 amino acids to about 580 amino acids, between about 280 amino acids to about 570 amino acids, between about 280 amino acids to about 560 amino acids, between about 280 amino acids to about 550 amino acids, between about 280 amino acids to about 540 amino acids, between about 280 amino acids to about 530 amino acids, between about 280 amino acids to about 520 amino acids, between about 280 amino acids to about 510 amino acids, between about 280 amino acids to about 500 amino acids, between about 280 amino acids to about 490 amino acids, between about 280 amino acids to about 480 amino acids, between about 280 amino acids to about 470 amino acids, between about 280 amino acids to about 460 amino acids, between about 280 amino acids to about 450 amino acids, between about 280 amino acids to about 440 amino acids, between about 280 amino acids to about 430 amino acids, between about 280 amino acids to about 420 amino acids, between about 280 amino acids to about 410 amino acids, between about 280 amino acids to about 400 amino acids, between about 280 amino acids to about 390 amino acids, between about 280 amino acids to about 380 amino acids, between about 280 amino acids to about 370 amino acids, between about 280 amino acids to about 360 amino acids, between about 280 amino acids to about 350 amino acids, between about 280 amino acids to about 340 amino acids, between about 280 amino acids to about 330 amino acids, between about 280 amino acids to about 320 amino acids, between about 280 amino acids to about 310 amino acids, between about 280 amino acids to about 300 amino acids, between about 300 amino acids to about 800 amino acids, between about 300 amino acids to about 790 amino acids, between about 300 amino acids to about 780 amino acids, between about 300 amino acids to about 770 amino acids, between about 300 amino acids to about 760 amino acids, between about 300 amino acids to about 750 amino acids, between about 300 amino acids to about 740 amino acids, between about 300 amino acids to about 730 amino acids, between about 300 amino acids to about 720 amino acids, between about 300 amino acids to about 710 amino acids, between about 300 amino acids to about 700 amino acids, between about 300 amino acids to about 690 amino acids, between about 300 amino acids to about 680 amino acids, between 30 amino acids to about 670 amino acids, between about 300 amino acids to about 660 amino acids, between about 300 amino acids to about 650 amino acids, between about 300 amino acids to about 640 amino acids, between about 30 amino acids to about 630 amino acids, between about 300 amino acids to about 620 amino acids, between about 300 amino acids to about 610 amino acids, between about 300 amino acids to about 600 amino acids, between about 300 amino acids to about 590 amino acids, between about 300 amino acids to about 580 amino acids, between about 300 amino acids to about 570 amino acids, between about 300 amino acids to about 560 amino acids, between about 300 amino acids to about 550 amino acids, between about 300 amino acids to about 540 amino acids, between about 300 amino acids to about 530 amino acids, between about 300 amino acids to about 520 amino acids, between about 300 amino acids to about 510 amino acids, between about 300 amino acids to about 500 amino acids, between about 300 amino acids to about 490 amino acids, between about 300 amino acids to about 480 amino acids, between about 300 amino acids to about 470 amino acids, between about 300 amino acids to about 460 amino acids, between about 300 amino acids to about 450 amino acids, between about 300 amino acids to about 440 amino acids, between about 300 amino acids to about 430 amino acids, between about 300 amino acids to about 420 amino acids, between about 300 amino acids to about 410 amino acids, between about 300 amino acids to about 400 amino acids, between about 300 amino acids to about 390 amino acids, between about 300 amino acids to about 380 amino acids, between about 300 amino acids to about 370 amino acids, between about 300 amino acids to about 360 amino acids, between about 300 amino acids to about 350 amino acids, between about 300 amino acids to about 340 amino acids, between about 300 amino acids to about 330 amino acids, between about 300 amino acids to about 320 amino acids, between about 300 amino acids to about 310 amino acids, between about 350 amino acids to about 800 amino acids, between about 350 amino acids to about 790 amino acids, between about 350 amino acids to about 780 amino acids, between about 350 amino acids to about 770 amino acids, between about 350 amino acids to about 760 amino acids, between about 350 amino acids to about 750 amino acids, between about 350 amino acids to about 740 amino acids, between about 350 amino acids to about 730 amino acids, between about 350 amino acids to about 720 amino acids, between about 350 amino acids to about 710 amino acids, between about 350 amino acids to about 700 amino acids, between about 350 amino acids to about 690 amino acids, between about 350 amino acids to about 680 amino acids, between 30 amino acids to about 670 amino acids, between about 350 amino acids to about 660 amino acids, between about 350 amino acids to about 650 amino acids, between about 350 amino acids to about 640 amino acids, between about 30 amino acids to about 630 amino acids, between about 350 amino acids to about 620 amino acids, between about 350 amino acids to about 610 amino acids, between about 350 amino acids to about 600 amino acids, between about 350 amino acids to about 590 amino acids, between about 350 amino acids to about 580 amino acids, between about 350 amino acids to about 570 amino acids, between about 350 amino acids to about 560 amino acids, between about 350 amino acids to about 550 amino acids, between about 350 amino acids to about 540 amino acids, between about 350 amino acids to about 530 amino acids, between about 350 amino acids to about 520 amino acids, between about 350 amino acids to about 510 amino acids, between about 350 amino acids to about 500 amino acids, between about 350 amino acids to about 490 amino acids, between about 350 amino acids to about 480 amino acids, between about 350 amino acids to about 470 amino acids, between about 350 amino acids to about 460 amino acids, between about 350 amino acids to about 450 amino acids, between about 350 amino acids to about 440 amino acids, between about 350 amino acids to about 430 amino acids, between about 350 amino acids to about 420 amino acids, between about 350 amino acids to about 410 amino acids, between about 350 amino acids to about 400 amino acids, between about 350 amino acids to about 390 amino acids, between about 350 amino acids to about 380 amino acids, between about 350 amino acids to about 370 amino acids, between about 350 amino acids to about 360 amino acids, between about 380 amino acids to about 800 amino acids, between about 380 amino acids to about 790 amino acids, between about 380 amino acids to about 780 amino acids, between about 380 amino acids to about 770 amino acids, between about 380 amino acids to about 760 amino acids, between about 380 amino acids to about 750 amino acids, between about 380 amino acids to about 740 amino acids, between about 380 amino acids to about 730 amino acids, between about 380 amino acids to about 720 amino acids, between about 380 amino acids to about 710 amino acids, between about 380 amino acids to about 700 amino acids, between about 380 amino acids to about 690 amino acids, between about 380 amino acids to about 680 amino acids, between 30 amino acids to about 670 amino acids, between about 380 amino acids to about 660 amino acids, between about 380 amino acids to about 650 amino acids, between about 380 amino acids to about 640 amino acids, between about 30 amino acids to about 630 amino acids, between about 380 amino acids to about 620 amino acids, between about 380 amino acids to about 610 amino acids, between about 380 amino acids to about 600 amino acids, between about 380 amino acids to about 590 amino acids, between about 380 amino acids to about 580 amino acids, between about 380 amino acids to about 570 amino acids, between about 380 amino acids to about 560 amino acids, between about 380 amino acids to about 550 amino acids, between about 380 amino acids to about 540 amino acids, between about 380 amino acids to about 530 amino acids, between about 380 amino acids to about 520 amino acids, between about 380 amino acids to about 510 amino acids, between about 380 amino acids to about 500 amino acids, between about 380 amino acids to about 490 amino acids, between about 380 amino acids to about 480 amino acids, between about 380 amino acids to about 470 amino acids, between about 380 amino acids to about 460 amino acids, between about 380 amino acids to about 450 amino acids, between about 380 amino acids to about 440 amino acids, between about 380 amino acids to about 430 amino acids, between about 380 amino acids to about 420 amino acids, between about 380 amino acids to about 410 amino acids, between about 380 amino acids to about 400 amino acids, between about 380 amino acids to about 390 amino acids, between about 400 amino acids to about 800 amino acids, between about 400 amino acids to about 790 amino acids, between about 400 amino acids to about 780 amino acids, between about 400 amino acids to about 770 amino acids, between about 400 amino acids to about 760 amino acids, between about 400 amino acids to about 750 amino acids, between about 400 amino acids to about 740 amino acids, between about 400 amino acids to about 730 amino acids, between about 400 amino acids to about 720 amino acids, between about 400 amino acids to about 710 amino acids, between about 400 amino acids to about 700 amino acids, between about 400 amino acids to about 690 amino acids, between about 400 amino acids to about 680 amino acids, between 30 amino acids to about 670 amino acids, between about 400 amino acids to about 660 amino acids, between about 400 amino acids to about 650 amino acids, between about 400 amino acids to about 640 amino acids, between about 30 amino acids to about 630 amino acids, between about 400 amino acids to about 620 amino acids, between about 400 amino acids to about 610 amino acids, between about 400 amino acids to about 600 amino acids, between about 400 amino acids to about 590 amino acids, between about 400 amino acids to about 580 amino acids, between about 400 amino acids to about 570 amino acids, between about 400 amino acids to about 560 amino acids, between about 400 amino acids to about 550 amino acids, between about 400 amino acids to about 540 amino acids, between about 400 amino acids to about 530 amino acids, between about 400 amino acids to about 520 amino acids, between about 400 amino acids to about 510 amino acids, between about 400 amino acids to about 500 amino acids, between about 400 amino acids to about 490 amino acids, between about 400 amino acids to about 480 amino acids, between about 400 amino acids to about 470 amino acids, between about 400 amino acids to about 460 amino acids, between about 400 amino acids to about 450 amino acids, between about 400 amino acids to about 440 amino acids, between about 400 amino acids to about 430 amino acids, between about 400 amino acids to about 420 amino acids, between about 400 amino acids to about 410 amino acids, between about 450 amino acids to about 800 amino acids, between about 450 amino acids to about 790 amino acids, between about 450 amino acids to about 780 amino acids, between about 450 amino acids to about 770 amino acids, between about 450 amino acids to about 760 amino acids, between about 450 amino acids to about 750 amino acids, between about 450 amino acids to about 740 amino acids, between about 450 amino acids to about 730 amino acids, between about 450 amino acids to about 720 amino acids, between about 450 amino acids to about 710 amino acids, between about 450 amino acids to about 700 amino acids, between about 450 amino acids to about 690 amino acids, between about 450 amino acids to about 680 amino acids, between 30 amino acids to about 670 amino acids, between about 450 amino acids to about 660 amino acids, between about 450 amino acids to about 650 amino acids, between about 450 amino acids to about 640 amino acids, between about 30 amino acids to about 630 amino acids, between about 450 amino acids to about 620 amino acids, between about 450 amino acids to about 610 amino acids, between about 450 amino acids to about 600 amino acids, between about 450 amino acids to about 590 amino acids, between about 450 amino acids to about 580 amino acids, between about 450 amino acids to about 570 amino acids, between about 450 amino acids to about 560 amino acids, between about 450 amino acids to about 550 amino acids, between about 450 amino acids to about 540 amino acids, between about 450 amino acids to about 530 amino acids, between about 450 amino acids to about 520 amino acids, between about 450 amino acids to about 510 amino acids, between about 450 amino acids to about 500 amino acids, between about 450 amino acids to about 490 amino acids, between about 450 amino acids to about 480 amino acids, between about 450 amino acids to about 470 amino acids, between about 450 amino acids to about 460 amino acids, between about 480 amino acids to about 800 amino acids, between about 480 amino acids to about 790 amino acids, between about 480 amino acids to about 780 amino acids, between about 480 amino acids to about 770 amino acids, between about 480 amino acids to about 760 amino acids, between about 480 amino acids to about 750 amino acids, between about 480 amino acids to about 740 amino acids, between about 480 amino acids to about 730 amino acids, between about 480 amino acids to about 720 amino acids, between about 480 amino acids to about 710 amino acids, between about 480 amino acids to about 700 amino acids, between about 480 amino acids to about 690 amino acids, between about 480 amino acids to about 680 amino acids, between 30 amino acids to about 670 amino acids, between about 480 amino acids to about 660 amino acids, between about 480 amino acids to about 650 amino acids, between about 480 amino acids to about 640 amino acids, between about 30 amino acids to about 630 amino acids, between about 480 amino acids to about 620 amino acids, between about 480 amino acids to about 610 amino acids, between about 480 amino acids to about 600 amino acids, between about 480 amino acids to about 590 amino acids, between about 480 amino acids to about 580 amino acids, between about 480 amino acids to about 570 amino acids, between about 480 amino acids to about 560 amino acids, between about 480 amino acids to about 550 amino acids, between about 480 amino acids to about 540 amino acids, between about 480 amino acids to about 530 amino acids, between about 480 amino acids to about 520 amino acids, between about 480 amino acids to about 510 amino acids, between about 480 amino acids to about 500 amino acids, between about 480 amino acids to about 490 amino acids, between about 50 amino acids to about 800 amino acids, between about 50 amino acids to about 790 amino acids, between about 50 amino acids to about 780 amino acids, between about 50 amino acids to about 770 amino acids, between about 50 amino acids to about 760 amino acids, between about 50 amino acids to about 750 amino acids, between about 50 amino acids to about 740 amino acids, between about 50 amino acids to about 730 amino acids, between about 50 amino acids to about 720 amino acids, between about 50 amino acids to about 710 amino acids, between about 50 amino acids to about 700 amino acids, between about 50 amino acids to about 690 amino acids, between about 50 amino acids to about 680 amino acids, between 30 amino acids to about 670 amino acids, between about 50 amino acids to about 660 amino acids, between about 50 amino acids to about 650 amino acids, between about 50 amino acids to about 640 amino acids, between about 30 amino acids to about 630 amino acids, between about 50 amino acids to about 620 amino acids, between about 50 amino acids to about 610 amino acids, between about 50 amino acids to about 600 amino acids, between about 50 amino acids to about 590 amino acids, between about 50 amino acids to about 580 amino acids, between about 50 amino acids to about 570 amino acids, between about 50 amino acids to about 560 amino acids, between about 50 amino acids to about 550 amino acids, between about 50 amino acids to about 540 amino acids, between about 50 amino acids to about 530 amino acids, between about 50 amino acids to about 520 amino acids, between about 50 amino acids to about 510 amino acids, between about 550 amino acids to about 800 amino acids, between about 550 amino acids to about 790 amino acids, between about 550 amino acids to about 780 amino acids, between about 550 amino acids to about 770 amino acids, between about 550 amino acids to about 760 amino acids, between about 550 amino acids to about 750 amino acids, between about 550 amino acids to about 740 amino acids, between about 550 amino acids to about 730 amino acids, between about 550 amino acids to about 720 amino acids, between about 550 amino acids to about 710 amino acids, between about 550 amino acids to about 700 amino acids, between about 550 amino acids to about 690 amino acids, between about 550 amino acids to about 680 amino acids, between 30 amino acids to about 670 amino acids, between about 550 amino acids to about 660 amino acids, between about 550 amino acids to about 650 amino acids, between about 550 amino acids to about 640 amino acids, between about 30 amino acids to about 630 amino acids, between about 550 amino acids to about 620 amino acids, between about 550 amino acids to about 610 amino acids, between about 550 amino acids to about 600 amino acids, between about 550 amino acids to about 590 amino acids, between about 550 amino acids to about 580 amino acids, between about 550 amino acids to about 570 amino acids, between about 550 amino acids to about 560 amino acids, between about 580 amino acids to about 800 amino acids, between about 580 amino acids to about 790 amino acids, between about 580 amino acids to about 780 amino acids, between about 580 amino acids to about 770 amino acids, between about 580 amino acids to about 760 amino acids, between about 580 amino acids to about 750 amino acids, between about 580 amino acids to about 740 amino acids, between about 580 amino acids to about 730 amino acids, between about 580 amino acids to about 720 amino acids, between about 580 amino acids to about 710 amino acids, between about 580 amino acids to about 700 amino acids, between about 580 amino acids to about 690 amino acids, between about 580 amino acids to about 680 amino acids, between 30 amino acids to about 670 amino acids, between about 580 amino acids to about 660 amino acids, between about 580 amino acids to about 650 amino acids, between about 580 amino acids to about 640 amino acids, between about 30 amino acids to about 630 amino acids, between about 580 amino acids to about 620 amino acids, between about 580 amino acids to about 610 amino acids, between about 580 amino acids to about 600 amino acids, between about 580 amino acids to about 590 amino acids, between about 600 amino acids to about 800 amino acids, between about 600 amino acids to about 790 amino acids, between about 600 amino acids to about 780 amino acids, between about 600 amino acids to about 770 amino acids, between about 600 amino acids to about 760 amino acids, between about 600 amino acids to about 750 amino acids, between about 600 amino acids to about 740 amino acids, between about 600 amino acids to about 730 amino acids, between about 600 amino acids to about 720 amino acids, between about 600 amino acids to about 710 amino acids, between about 600 amino acids to about 700 amino acids, between about 600 amino acids to about 690 amino acids, between about 600 amino acids to about 680 amino acids, between 30 amino acids to about 670 amino acids, between about 600 amino acids to about 660 amino acids, between about 600 amino acids to about 650 amino acids, between about 600 amino acids to about 640 amino acids, between about 30 amino acids to about 630 amino acids, between about 600 amino acids to about 620 amino acids, between about 600 amino acids to about 610 amino acids, between about 650 amino acids to about 800 amino acids, between about 650 amino acids to about 790 amino acids, between about 650 amino acids to about 780 amino acids, between about 650 amino acids to about 770 amino acids, between about 650 amino acids to about 760 amino acids, between about 650 amino acids to about 750 amino acids, between about 650 amino acids to about 740 amino acids, between about 650 amino acids to about 730 amino acids, between about 650 amino acids to about 720 amino acids, between about 650 amino acids to about 710 amino acids, between about 650 amino acids to about 700 amino acids, between about 650 amino acids to about 690 amino acids, between about 650 amino acids to about 680 amino acids, between 30 amino acids to about 670 amino acids, between about 650 amino acids to about 660 amino acids, between about 680 amino acids to about 800 amino acids, between about 680 amino acids to about 790 amino acids, between about 680 amino acids to about 780 amino acids, between about 680 amino acids to about 770 amino acids, between about 680 amino acids to about 760 amino acids, between about 680 amino acids to about 750 amino acids, between about 680 amino acids to about 740 amino acids, between about 680 amino acids to about 730 amino acids, between about 680 amino acids to about 720 amino acids, between about 680 amino acids to about 710 amino acids, between about 680 amino acids to about 700 amino acids, between about 680 amino acids to about 690 amino acids, between about 700 amino acids to about 800 amino acids, between about 700 amino acids to about 790 amino acids, between about 700 amino acids to about 780 amino acids, between about 700 amino acids to about 770 amino acids, between about 700 amino acids to about 760 amino acids, between about 700 amino acids to about 750 amino acids, between about 700 amino acids to about 740 amino acids, between about 700 amino acids to about 730 amino acids, between about 700 amino acids to about 720 amino acids, between about 700 amino acids to about 710 amino acids, between about 750 amino acids to about 800 amino acids, between about 750 amino acids to about 790 amino acids, between about 750 amino acids to about 780 amino acids, between about 750 amino acids to about 770 amino acids, between about 750 amino acids to about 760 amino acids, or between about 780 amino acids to about 800 amino acids) in length. In some examples, the first vector further includes one or both of a promoter (e.g., any of the promoters described herein or known in the art) and a Kozak sequence (e.g., any of the exemplary Kozak sequences described herein or known in the art). In some examples, the first vector includes a promoter that is an inducible promoter, a constitutive promoter, or a tissue-specific promoter. In some examples, the second of the two different vectors includes a coding sequence that encodes a C-terminal portion of the target protein (e.g., a C-terminal portion of the supporting cell target protein or a C-terminal portion of the hair cell target protein). In some examples, the C-terminal portion of the target protein (e.g., the C-terminal portion of the supporting cell target protein or the C-terminal portion of the hair cell target protein) is between about 30 amino acids to about 800 amino acids (e.g., between about 30 amino acids to about 790 amino acids, between about 30 amino acids to about 780 amino acids, between about 30 amino acids to about 770 amino acids, between about 30 amino acids to about 760 amino acids, between about 30 amino acids to about 750 amino acids, between about 30 amino acids to about 740 amino acids, between about 30 amino acids to about 730 amino acids, between about 30 amino acids to about 720 amino acids, between about 30 amino acids to about 710 amino acids, between about 30 amino acids to about 700 amino acids, between about 30 amino acids to about 690 amino acids, between about 30 amino acids to about 680 amino acids, between 30 amino acids to about 670 amino acids, between about 30 amino acids to about 660 amino acids, between about 30 amino acids to about 650 amino acids, between about 30 amino acids to about 640 amino acids, between about 30 amino acids to about 630 amino acids, between about 30 amino acids to about 620 amino acids, between about 30 amino acids to about 610 amino acids, between about 30 amino acids to about 600 amino acids, between about 30 amino acids to about 590 amino acids, between about 30 amino acids to about 580 amino acids, between about 30 amino acids to about 570 amino acids, between about 30 amino acids to about 560 amino acids, between about 30 amino acids to about 550 amino acids, between about 30 amino acids to about 540 amino acids, between about 30 amino acids to about 530 amino acids, between about 30 amino acids to about 520 amino acids, between about 30 amino acids to about 510 amino acids, between about 30 amino acids to about 500 amino acids, between about 30 amino acids to about 490 amino acids, between about 30 amino acids to about 480 amino acids, between about 30 amino acids to about 470 amino acids, between about 30 amino acids to about 460 amino acids, between about 30 amino acids to about 450 amino acids, between about 30 amino acids to about 440 amino acids, between about 30 amino acids to about 430 amino acids, between about 30 amino acids to about 420 amino acids, between about 30 amino acids to about 410 amino acids, between about 30 amino acids to about 400 amino acids, between about 30 amino acids to about 390 amino acids, between about 30 amino acids to about 380 amino acids, between about 30 amino acids to about 370 amino acids, between about 30 amino acids to about 360 amino acids, between about 30 amino acids to about 350 amino acids, between about 30 amino acids to about 340 amino acids, between about 30 amino acids to about 330 amino acids, between about 30 amino acids to about 320 amino acids, between about 30 amino acids to about 310 amino acids, between about 30 amino acids to about 300 amino acids, between about 30 amino acids to about 290 amino acids, between about 30 amino acids to about 280 amino acids, between about 30 amino acids to about 270 amino acids, between about 30 amino acids to about 260 amino acids, between about 30 amino acids to about 250 amino acids, between about 30 amino acids to about 240 amino acids, between about 30 amino acids to about 230 amino acids, between about 30 amino acids to about 220 amino acids, between about 30 amino acids to about 210 amino acids, between about 30 amino acids to about 200 amino acids, between about 30 amino acids to about 190 amino acids, between about 30 amino acids to about 180 amino acids, between about 30 amino acids to about 170 amino acids, between about 30 amino acids to about 160 amino acids, between about 30 amino acids to about 150 amino acids, between about 30 amino acids to about 140 amino acids, between about 30 amino acids to about 130 amino acids, between about 30 amino acids to about 120 amino acids, between about 30 amino acids to about 110 amino acids, between about 30 amino acids to about 100 amino acids, between about 30 amino acids to about 90 amino acids, between about 30 amino acids to about 80 amino acids, between about 30 amino acids to about 70 amino acids, between about 30 amino acids to about 60 amino acids, between about 30 amino acids to about 50 amino acids, between about 30 amino acids to about 40 amino acids, between about 50 amino acids to about 800 amino acids, between about 50 amino acids to about 790 amino acids, between about 50 amino acids to about 780 amino acids, between about 50 amino acids to about 770 amino acids, between about 50 amino acids to about 760 amino acids, between about 50 amino acids to about 750 amino acids, between about 50 amino acids to about 740 amino acids, between about 50 amino acids to about 730 amino acids, between about 50 amino acids to about 720 amino acids, between about 50 amino acids to about 710 amino acids, between about 50 amino acids to about 700 amino acids, between about 50 amino acids to about 690 amino acids, between about 50 amino acids to about 680 amino acids, between 30 amino acids to about 670 amino acids, between about 50 amino acids to about 660 amino acids, between about 50 amino acids to about 650 amino acids, between about 50 amino acids to about 640 amino acids, between about 30 amino acids to about 630 amino acids, between about 50 amino acids to about 620 amino acids, between about 50 amino acids to about 610 amino acids, between about 50 amino acids to about 600 amino acids, between about 50 amino acids to about 590 amino acids, between about 50 amino acids to about 580 amino acids, between about 50 amino acids to about 570 amino acids, between about 50 amino acids to about 560 amino acids, between about 50 amino acids to about 550 amino acids, between about 50 amino acids to about 540 amino acids, between about 50 amino acids to about 530 amino acids, between about 50 amino acids to about 520 amino acids, between about 50 amino acids to about 510 amino acids, between about 50 amino acids to about 500 amino acids, between about 50 amino acids to about 490 amino acids, between about 50 amino acids to about 480 amino acids, between about 50 amino acids to about 470 amino acids, between about 50 amino acids to about 460 amino acids, between about 50 amino acids to about 450 amino acids, between about 50 amino acids to about 440 amino acids, between about 50 amino acids to about 430 amino acids, between about 50 amino acids to about 420 amino acids, between about 50 amino acids to about 410 amino acids, between about 50 amino acids to about 400 amino acids, between about 50 amino acids to about 390 amino acids, between about 50 amino acids to about 380 amino acids, between about 50 amino acids to about 370 amino acids, between about 50 amino acids to about 360 amino acids, between about 50 amino acids to about 350 amino acids, between about 50 amino acids to about 340 amino acids, between about 50 amino acids to about 330 amino acids, between about 50 amino acids to about 320 amino acids, between about 50 amino acids to about 310 amino acids, between about 50 amino acids to about 300 amino acids, between about 50 amino acids to about 290 amino acids, between about 50 amino acids to about 280 amino acids, between about 50 amino acids to about 270 amino acids, between about 50 amino acids to about 260 amino acids, between about 50 amino acids to about 250 amino acids, between about 50 amino acids to about 240 amino acids, between about 50 amino acids to about 230 amino acids, between about 50 amino acids to about 220 amino acids, between about 50 amino acids to about 210 amino acids, between about 50 amino acids to about 200 amino acids, between about 50 amino acids to about 190 amino acids, between about 50 amino acids to about 180 amino acids, between about 50 amino acids to about 170 amino acids, between about 50 amino acids to about 160 amino acids, between about 50 amino acids to about 150 amino acids, between about 50 amino acids to about 140 amino acids, between about 50 amino acids to about 130 amino acids, between about 50 amino acids to about 120 amino acids, between about 50 amino acids to about 110 amino acids, between about 50 amino acids to about 100 amino acids, between about 50 amino acids to about 90 amino acids, between about 50 amino acids to about 80 amino acids, between about 50 amino acids to about 70 amino acids, between about 50 amino acids to about 60 amino acids, between about 80 amino acids to about 800 amino acids, between about 80 amino acids to about 790 amino acids, between about 80 amino acids to about 780 amino acids, between about 80 amino acids to about 770 amino acids, between about 80 amino acids to about 760 amino acids, between about 80 amino acids to about 750 amino acids, between about 80 amino acids to about 740 amino acids, between about 80 amino acids to about 730 amino acids, between about 80 amino acids to about 720 amino acids, between about 80 amino acids to about 710 amino acids, between about 80 amino acids to about 700 amino acids, between about 80 amino acids to about 690 amino acids, between about 80 amino acids to about 680 amino acids, between 30 amino acids to about 670 amino acids, between about 80 amino acids to about 660 amino acids, between about 80 amino acids to about 650 amino acids, between about 80 amino acids to about 640 amino acids, between about 30 amino acids to about 630 amino acids, between about 80 amino acids to about 620 amino acids, between about 80 amino acids to about 610 amino acids, between about 80 amino acids to about 600 amino acids, between about 80 amino acids to about 590 amino acids, between about 80 amino acids to about 580 amino acids, between about 80 amino acids to about 570 amino acids, between about 80 amino acids to about 560 amino acids, between about 80 amino acids to about 550 amino acids, between about 80 amino acids to about 540 amino acids, between about 80 amino acids to about 530 amino acids, between about 80 amino acids to about 520 amino acids, between about 80 amino acids to about 510 amino acids, between about 80 amino acids to about 500 amino acids, between about 80 amino acids to about 490 amino acids, between about 80 amino acids to about 480 amino acids, between about 80 amino acids to about 470 amino acids, between about 80 amino acids to about 460 amino acids, between about 80 amino acids to about 450 amino acids, between about 80 amino acids to about 440 amino acids, between about 80 amino acids to about 430 amino acids, between about 80 amino acids to about 420 amino acids, between about 80 amino acids to about 410 amino acids, between about 80 amino acids to about 400 amino acids, between about 80 amino acids to about 390 amino acids, between about 80 amino acids to about 380 amino acids, between about 80 amino acids to about 370 amino acids, between about 80 amino acids to about 360 amino acids, between about 80 amino acids to about 350 amino acids, between about 80 amino acids to about 340 amino acids, between about 80 amino acids to about 330 amino acids, between about 80 amino acids to about 320 amino acids, between about 80 amino acids to about 310 amino acids, between about 80 amino acids to about 300 amino acids, between about 80 amino acids to about 290 amino acids, between about 80 amino acids to about 280 amino acids, between about 80 amino acids to about 270 amino acids, between about 80 amino acids to about 260 amino acids, between about 80 amino acids to about 250 amino acids, between about 80 amino acids to about 240 amino acids, between about 80 amino acids to about 230 amino acids, between about 80 amino acids to about 220 amino acids, between about 80 amino acids to about 210 amino acids, between about 80 amino acids to about 200 amino acids, between about 80 amino acids to about 190 amino acids, between about 80 amino acids to about 180 amino acids, between about 80 amino acids to about 170 amino acids, between about 80 amino acids to about 160 amino acids, between about 80 amino acids to about 150 amino acids, between about 80 amino acids to about 140 amino acids, between about 80 amino acids to about 130 amino acids, between about 80 amino acids to about 120 amino acids, between about 80 amino acids to about 110 amino acids, between about 80 amino acids to about 100 amino acids, between about 100 amino acids to about 800 amino acids, between about 100 amino acids to about 790 amino acids, between about 100 amino acids to about 780 amino acids, between about 100 amino acids to about 770 amino acids, between about 100 amino acids to about 760 amino acids, between about 100 amino acids to about 750 amino acids, between about 100 amino acids to about 740 amino acids, between about 100 amino acids to about 730 amino acids, between about 100 amino acids to about 720 amino acids, between about 100 amino acids to about 710 amino acids, between about 100 amino acids to about 700 amino acids, between about 100 amino acids to about 690 amino acids, between about 100 amino acids to about 680 amino acids, between 30 amino acids to about 670 amino acids, between about 100 amino acids to about 660 amino acids, between about 100 amino acids to about 650 amino acids, between about 100 amino acids to about 640 amino acids, between about 30 amino acids to about 630 amino acids, between about 100 amino acids to about 620 amino acids, between about 100 amino acids to about 610 amino acids, between about 100 amino acids to about 600 amino acids, between about 100 amino acids to about 590 amino acids, between about 100 amino acids to about 580 amino acids, between about 100 amino acids to about 570 amino acids, between about 100 amino acids to about 560 amino acids, between about 100 amino acids to about 550 amino acids, between about 100 amino acids to about 540 amino acids, between about 100 amino acids to about 530 amino acids, between about 100 amino acids to about 520 amino acids, between about 100 amino acids to about 510 amino acids, between about 100 amino acids to about 500 amino acids, between about 100 amino acids to about 490 amino acids, between about 100 amino acids to about 480 amino acids, between about 100 amino acids to about 470 amino acids, between about 100 amino acids to about 460 amino acids, between about 100 amino acids to about 450 amino acids, between about 100 amino acids to about 440 amino acids, between about 100 amino acids to about 430 amino acids, between about 100 amino acids to about 420 amino acids, between about 100 amino acids to about 410 amino acids, between about 100 amino acids to about 400 amino acids, between about 100 amino acids to about 390 amino acids, between about 100 amino acids to about 380 amino acids, between about 100 amino acids to about 370 amino acids, between about 100 amino acids to about 360 amino acids, between about 100 amino acids to about 350 amino acids, between about 100 amino acids to about 340 amino acids, between about 100 amino acids to about 330 amino acids, between about 100 amino acids to about 320 amino acids, between about 100 amino acids to about 310 amino acids, between about 100 amino acids to about 300 amino acids, between about 100 amino acids to about 290 amino acids, between about 100 amino acids to about 280 amino acids, between about 100 amino acids to about 270 amino acids, between about 100 amino acids to about 260 amino acids, between about 100 amino acids to about 250 amino acids, between about 100 amino acids to about 240 amino acids, between about 100 amino acids to about 230 amino acids, between about 100 amino acids to about 220 amino acids, between about 100 amino acids to about 210 amino acids, between about 100 amino acids to about 200 amino acids, between about 100 amino acids to about 190 amino acids, between about 100 amino acids to about 180 amino acids, between about 100 amino acids to about 170 amino acids, between about 100 amino acids to about 160 amino acids, between about 100 amino acids to about 150 amino acids, between about 100 amino acids to about 140 amino acids, between about 100 amino acids to about 130 amino acids, between about 100 amino acids to about 120 amino acids, between about 100 amino acids to about 110 amino acids, between about 120 amino acids to about 800 amino acids, between about 120 amino acids to about 790 amino acids, between about 120 amino acids to about 780 amino acids, between about 120 amino acids to about 770 amino acids, between about 120 amino acids to about 760 amino acids, between about 120 amino acids to about 750 amino acids, between about 120 amino acids to about 740 amino acids, between about 120 amino acids to about 730 amino acids, between about 120 amino acids to about 720 amino acids, between about 120 amino acids to about 710 amino acids, between about 120 amino acids to about 700 amino acids, between about 120 amino acids to about 690 amino acids, between about 120 amino acids to about 680 amino acids, between 30 amino acids to about 670 amino acids, between about 120 amino acids to about 660 amino acids, between about 120 amino acids to about 650 amino acids, between about 120 amino acids to about 640 amino acids, between about 30 amino acids to about 630 amino acids, between about 120 amino acids to about 620 amino acids, between about 120 amino acids to about 610 amino acids, between about 120 amino acids to about 600 amino acids, between about 120 amino acids to about 590 amino acids, between about 120 amino acids to about 580 amino acids, between about 120 amino acids to about 570 amino acids, between about 120 amino acids to about 560 amino acids, between about 120 amino acids to about 550 amino acids, between about 120 amino acids to about 540 amino acids, between about 120 amino acids to about 530 amino acids, between about 120 amino acids to about 520 amino acids, between about 120 amino acids to about 510 amino acids, between about 120 amino acids to about 500 amino acids, between about 120 amino acids to about 490 amino acids, between about 120 amino acids to about 480 amino acids, between about 120 amino acids to about 470 amino acids, between about 120 amino acids to about 460 amino acids, between about 120 amino acids to about 450 amino acids, between about 120 amino acids to about 440 amino acids, between about 120 amino acids to about 430 amino acids, between about 120 amino acids to about 420 amino acids, between about 120 amino acids to about 410 amino acids, between about 120 amino acids to about 400 amino acids, between about 120 amino acids to about 390 amino acids, between about 120 amino acids to about 380 amino acids, between about 120 amino acids to about 370 amino acids, between about 120 amino acids to about 360 amino acids, between about 120 amino acids to about 350 amino acids, between about 120 amino acids to about 340 amino acids, between about 120 amino acids to about 330 amino acids, between about 120 amino acids to about 320 amino acids, between about 120 amino acids to about 310 amino acids, between about 120 amino acids to about 300 amino acids, between about 120 amino acids to about 290 amino acids, between about 120 amino acids to about 280 amino acids, between about 120 amino acids to about 270 amino acids, between about 120 amino acids to about 260 amino acids, between about 120 amino acids to about 250 amino acids, between about 120 amino acids to about 240 amino acids, between about 120 amino acids to about 230 amino acids, between about 120 amino acids to about 220 amino acids, between about 120 amino acids to about 210 amino acids, between about 120 amino acids to about 200 amino acids, between about 120 amino acids to about 190 amino acids, between about 120 amino acids to about 180 amino acids, between about 120 amino acids to about 170 amino acids, between about 120 amino acids to about 160 amino acids, between about 120 amino acids to about 150 amino acids, between about 120 amino acids to about 140 amino acids, between about 120 amino acids to about 130 amino acids, between about 150 amino acids to about 800 amino acids, between about 150 amino acids to about 790 amino acids, between about 150 amino acids to about 780 amino acids, between about 150 amino acids to about 770 amino acids, between about 150 amino acids to about 760 amino acids, between about 150 amino acids to about 750 amino acids, between about 150 amino acids to about 740 amino acids, between about 150 amino acids to about 730 amino acids, between about 150 amino acids to about 720 amino acids, between about 150 amino acids to about 710 amino acids, between about 150 amino acids to about 700 amino acids, between about 150 amino acids to about 690 amino acids, between about 150 amino acids to about 680 amino acids, between 30 amino acids to about 670 amino acids, between about 150 amino acids to about 660 amino acids, between about 150 amino acids to about 650 amino acids, between about 150 amino acids to about 640 amino acids, between about 30 amino acids to about 630 amino acids, between about 150 amino acids to about 620 amino acids, between about 150 amino acids to about 610 amino acids, between about 150 amino acids to about 600 amino acids, between about 150 amino acids to about 590 amino acids, between about 150 amino acids to about 580 amino acids, between about 150 amino acids to about 570 amino acids, between about 150 amino acids to about 560 amino acids, between about 150 amino acids to about 550 amino acids, between about 150 amino acids to about 540 amino acids, between about 150 amino acids to about 530 amino acids, between about 150 amino acids to about 520 amino acids, between about 150 amino acids to about 510 amino acids, between about 150 amino acids to about 500 amino acids, between about 150 amino acids to about 490 amino acids, between about 150 amino acids to about 480 amino acids, between about 150 amino acids to about 470 amino acids, between about 150 amino acids to about 460 amino acids, between about 150 amino acids to about 450 amino acids, between about 150 amino acids to about 440 amino acids, between about 150 amino acids to about 430 amino acids, between about 150 amino acids to about 420 amino acids, between about 150 amino acids to about 410 amino acids, between about 150 amino acids to about 400 amino acids, between about 150 amino acids to about 390 amino acids, between about 150 amino acids to about 380 amino acids, between about 150 amino acids to about 370 amino acids, between about 150 amino acids to about 360 amino acids, between about 150 amino acids to about 350 amino acids, between about 150 amino acids to about 340 amino acids, between about 150 amino acids to about 330 amino acids, between about 150 amino acids to about 320 amino acids, between about 150 amino acids to about 310 amino acids, between about 150 amino acids to about 300 amino acids, between about 150 amino acids to about 290 amino acids, between about 150 amino acids to about 280 amino acids, between about 150 amino acids to about 270 amino acids, between about 150 amino acids to about 260 amino acids, between about 150 amino acids to about 250 amino acids, between about 150 amino acids to about 240 amino acids, between about 150 amino acids to about 230 amino acids, between about 150 amino acids to about 220 amino acids, between about 150 amino acids to about 210 amino acids, between about 150 amino acids to about 200 amino acids, between about 150 amino acids to about 190 amino acids, between about 150 amino acids to about 180 amino acids, between about 150 amino acids to about 170 amino acids, between about 150 amino acids to about 160 amino acids, between about 180 amino acids to about 800 amino acids, between about 180 amino acids to about 790 amino acids, between about 180 amino acids to about 780 amino acids, between about 180 amino acids to about 770 amino acids, between about 180 amino acids to about 760 amino acids, between about 180 amino acids to about 750 amino acids, between about 180 amino acids to about 740 amino acids, between about 180 amino acids to about 730 amino acids, between about 180 amino acids to about 720 amino acids, between about 180 amino acids to about 710 amino acids, between about 180 amino acids to about 700 amino acids, between about 180 amino acids to about 690 amino acids, between about 180 amino acids to about 680 amino acids, between 30 amino acids to about 670 amino acids, between about 180 amino acids to about 660 amino acids, between about 180 amino acids to about 650 amino acids, between about 180 amino acids to about 640 amino acids, between about 30 amino acids to about 630 amino acids, between about 180 amino acids to about 620 amino acids, between about 180 amino acids to about 610 amino acids, between about 180 amino acids to about 600 amino acids, between about 180 amino acids to about 590 amino acids, between about 180 amino acids to about 580 amino acids, between about 180 amino acids to about 570 amino acids, between about 180 amino acids to about 560 amino acids, between about 180 amino acids to about 550 amino acids, between about 180 amino acids to about 540 amino acids, between about 180 amino acids to about 530 amino acids, between about 180 amino acids to about 520 amino acids, between about 180 amino acids to about 510 amino acids, between about 180 amino acids to about 500 amino acids, between about 180 amino acids to about 490 amino acids, between about 180 amino acids to about 480 amino acids, between about 180 amino acids to about 470 amino acids, between about 180 amino acids to about 460 amino acids, between about 180 amino acids to about 450 amino acids, between about 180 amino acids to about 440 amino acids, between about 180 amino acids to about 430 amino acids, between about 180 amino acids to about 420 amino acids, between about 180 amino acids to about 410 amino acids, between about 180 amino acids to about 400 amino acids, between about 180 amino acids to about 390 amino acids, between about 180 amino acids to about 380 amino acids, between about 180 amino acids to about 370 amino acids, between about 180 amino acids to about 360 amino acids, between about 180 amino acids to about 350 amino acids, between about 180 amino acids to about 340 amino acids, between about 180 amino acids to about 330 amino acids, between about 180 amino acids to about 320 amino acids, between about 180 amino acids to about 310 amino acids, between about 180 amino acids to about 300 amino acids, between about 180 amino acids to about 290 amino acids, between about 180 amino acids to about 280 amino acids, between about 180 amino acids to about 270 amino acids, between about 180 amino acids to about 260 amino acids, between about 180 amino acids to about 250 amino acids, between about 180 amino acids to about 240 amino acids, between about 180 amino acids to about 230 amino acids, between about 180 amino acids to about 220 amino acids, between about 180 amino acids to about 210 amino acids, between about 180 amino acids to about 200 amino acids, between about 180 amino acids to about 190 amino acids, between about 200 amino acids to about 800 amino acids, between about 200 amino acids to about 790 amino acids, between about 200 amino acids to about 780 amino acids, between about 200 amino acids to about 770 amino acids, between about 200 amino acids to about 760 amino acids, between about 200 amino acids to about 750 amino acids, between about 200 amino acids to about 740 amino acids, between about 200 amino acids to about 730 amino acids, between about 200 amino acids to about 720 amino acids, between about 200 amino acids to about 710 amino acids, between about 200 amino acids to about 700 amino acids, between about 200 amino acids to about 690 amino acids, between about 200 amino acids to about 680 amino acids, between 30 amino acids to about 670 amino acids, between about 200 amino acids to about 660 amino acids, between about 200 amino acids to about 650 amino acids, between about 200 amino acids to about 640 amino acids, between about 30 amino acids to about 630 amino acids, between about 200 amino acids to about 620 amino acids, between about 200 amino acids to about 610 amino acids, between about 200 amino acids to about 600 amino acids, between about 200 amino acids to about 590 amino acids, between about 200 amino acids to about 580 amino acids, between about 200 amino acids to about 570 amino acids, between about 200 amino acids to about 560 amino acids, between about 200 amino acids to about 550 amino acids, between about 200 amino acids to about 540 amino acids, between about 200 amino acids to about 530 amino acids, between about 200 amino acids to about 520 amino acids, between about 200 amino acids to about 510 amino acids, between about 200 amino acids to about 500 amino acids, between about 200 amino acids to about 490 amino acids, between about 200 amino acids to about 480 amino acids, between about 200 amino acids to about 470 amino acids, between about 200 amino acids to about 460 amino acids, between about 200 amino acids to about 450 amino acids, between about 200 amino acids to about 440 amino acids, between about 200 amino acids to about 430 amino acids, between about 200 amino acids to about 420 amino acids, between about 200 amino acids to about 410 amino acids, between about 200 amino acids to about 400 amino acids, between about 200 amino acids to about 390 amino acids, between about 200 amino acids to about 380 amino acids, between about 200 amino acids to about 370 amino acids, between about 200 amino acids to about 360 amino acids, between about 200 amino acids to about 350 amino acids, between about 200 amino acids to about 340 amino acids, between about 200 amino acids to about 330 amino acids, between about 200 amino acids to about 320 amino acids, between about 200 amino acids to about 310 amino acids, between about 200 amino acids to about 300 amino acids, between about 200 amino acids to about 290 amino acids, between about 200 amino acids to about 280 amino acids, between about 200 amino acids to about 270 amino acids, between about 200 amino acids to about 260 amino acids, between about 200 amino acids to about 250 amino acids, between about 200 amino acids to about 240 amino acids, between about 200 amino acids to about 230 amino acids, between about 200 amino acids to about 220 amino acids, between about 200 amino acids to about 210 amino acids, between about 250 amino acids to about 800 amino acids, between about 250 amino acids to about 790 amino acids, between about 250 amino acids to about 780 amino acids, between about 250 amino acids to about 770 amino acids, between about 250 amino acids to about 760 amino acids, between about 250 amino acids to about 750 amino acids, between about 250 amino acids to about 740 amino acids, between about 250 amino acids to about 730 amino acids, between about 250 amino acids to about 720 amino acids, between about 250 amino acids to about 710 amino acids, between about 250 amino acids to about 700 amino acids, between about 250 amino acids to about 690 amino acids, between about 250 amino acids to about 680 amino acids, between 30 amino acids to about 670 amino acids, between about 250 amino acids to about 660 amino acids, between about 250 amino acids to about 650 amino acids, between about 250 amino acids to about 640 amino acids, between about 30 amino acids to about 630 amino acids, between about 250 amino acids to about 620 amino acids, between about 250 amino acids to about 610 amino acids, between about 250 amino acids to about 600 amino acids, between about 250 amino acids to about 590 amino acids, between about 250 amino acids to about 580 amino acids, between about 250 amino acids to about 570 amino acids, between about 250 amino acids to about 560 amino acids, between about 250 amino acids to about 550 amino acids, between about 250 amino acids to about 540 amino acids, between about 250 amino acids to about 530 amino acids, between about 250 amino acids to about 520 amino acids, between about 250 amino acids to about 510 amino acids, between about 250 amino acids to about 500 amino acids, between about 250 amino acids to about 490 amino acids, between about 250 amino acids to about 480 amino acids, between about 250 amino acids to about 470 amino acids, between about 250 amino acids to about 460 amino acids, between about 250 amino acids to about 450 amino acids, between about 250 amino acids to about 440 amino acids, between about 250 amino acids to about 430 amino acids, between about 250 amino acids to about 420 amino acids, between about 250 amino acids to about 410 amino acids, between about 250 amino acids to about 400 amino acids, between about 250 amino acids to about 390 amino acids, between about 250 amino acids to about 380 amino acids, between about 250 amino acids to about 370 amino acids, between about 250 amino acids to about 360 amino acids, between about 250 amino acids to about 350 amino acids, between about 250 amino acids to about 340 amino acids, between about 250 amino acids to about 330 amino acids, between about 250 amino acids to about 320 amino acids, between about 250 amino acids to about 310 amino acids, between about 250 amino acids to about 300 amino acids, between about 250 amino acids to about 290 amino acids, between about 250 amino acids to about 280 amino acids, between about 250 amino acids to about 270 amino acids, between about 250 amino acids to about 260 amino acids, between about 280 amino acids to about 800 amino acids, between about 280 amino acids to about 790 amino acids, between about 280 amino acids to about 780 amino acids, between about 280 amino acids to about 770 amino acids, between about 280 amino acids to about 760 amino acids, between about 280 amino acids to about 750 amino acids, between about 280 amino acids to about 740 amino acids, between about 280 amino acids to about 730 amino acids, between about 280 amino acids to about 720 amino acids, between about 280 amino acids to about 710 amino acids, between about 280 amino acids to about 700 amino acids, between about 280 amino acids to about 690 amino acids, between about 280 amino acids to about 680 amino acids, between 30 amino acids to about 670 amino acids, between about 280 amino acids to about 660 amino acids, between about 280 amino acids to about 650 amino acids, between about 280 amino acids to about 640 amino acids, between about 30 amino acids to about 630 amino acids, between about 280 amino acids to about 620 amino acids, between about 280 amino acids to about 610 amino acids, between about 280 amino acids to about 600 amino acids, between about 280 amino acids to about 590 amino acids, between about 280 amino acids to about 580 amino acids, between about 280 amino acids to about 570 amino acids, between about 280 amino acids to about 560 amino acids, between about 280 amino acids to about 550 amino acids, between about 280 amino acids to about 540 amino acids, between about 280 amino acids to about 530 amino acids, between about 280 amino acids to about 520 amino acids, between about 280 amino acids to about 510 amino acids, between about 280 amino acids to about 500 amino acids, between about 280 amino acids to about 490 amino acids, between about 280 amino acids to about 480 amino acids, between about 280 amino acids to about 470 amino acids, between about 280 amino acids to about 460 amino acids, between about 280 amino acids to about 450 amino acids, between about 280 amino acids to about 440 amino acids, between about 280 amino acids to about 430 amino acids, between about 280 amino acids to about 420 amino acids, between about 280 amino acids to about 410 amino acids, between about 280 amino acids to about 400 amino acids, between about 280 amino acids to about 390 amino acids, between about 280 amino acids to about 380 amino acids, between about 280 amino acids to about 370 amino acids, between about 280 amino acids to about 360 amino acids, between about 280 amino acids to about 350 amino acids, between about 280 amino acids to about 340 amino acids, between about 280 amino acids to about 330 amino acids, between about 280 amino acids to about 320 amino acids, between about 280 amino acids to about 310 amino acids, between about 280 amino acids to about 300 amino acids, between about 300 amino acids to about 800 amino acids, between about 300 amino acids to about 790 amino acids, between about 300 amino acids to about 780 amino acids, between about 300 amino acids to about 770 amino acids, between about 300 amino acids to about 760 amino acids, between about 300 amino acids to about 750 amino acids, between about 300 amino acids to about 740 amino acids, between about 300 amino acids to about 730 amino acids, between about 300 amino acids to about 720 amino acids, between about 300 amino acids to about 710 amino acids, between about 300 amino acids to about 700 amino acids, between about 300 amino acids to about 690 amino acids, between about 300 amino acids to about 680 amino acids, between 30 amino acids to about 670 amino acids, between about 300 amino acids to about 660 amino acids, between about 300 amino acids to about 650 amino acids, between about 300 amino acids to about 640 amino acids, between about 30 amino acids to about 630 amino acids, between about 300 amino acids to about 620 amino acids, between about 300 amino acids to about 610 amino acids, between about 300 amino acids to about 600 amino acids, between about 300 amino acids to about 590 amino acids, between about 300 amino acids to about 580 amino acids, between about 300 amino acids to about 570 amino acids, between about 300 amino acids to about 560 amino acids, between about 300 amino acids to about 550 amino acids, between about 300 amino acids to about 540 amino acids, between about 300 amino acids to about 530 amino acids, between about 300 amino acids to about 520 amino acids, between about 300 amino acids to about 510 amino acids, between about 300 amino acids to about 500 amino acids, between about 300 amino acids to about 490 amino acids, between about 300 amino acids to about 480 amino acids, between about 300 amino acids to about 470 amino acids, between about 300 amino acids to about 460 amino acids, between about 300 amino acids to about 450 amino acids, between about 300 amino acids to about 440 amino acids, between about 300 amino acids to about 430 amino acids, between about 300 amino acids to about 420 amino acids, between about 300 amino acids to about 410 amino acids, between about 300 amino acids to about 400 amino acids, between about 300 amino acids to about 390 amino acids, between about 300 amino acids to about 380 amino acids, between about 300 amino acids to about 370 amino acids, between about 300 amino acids to about 360 amino acids, between about 300 amino acids to about 350 amino acids, between about 300 amino acids to about 340 amino acids, between about 300 amino acids to about 330 amino acids, between about 300 amino acids to about 320 amino acids, between about 300 amino acids to about 310 amino acids, between about 350 amino acids to about 800 amino acids, between about 350 amino acids to about 790 amino acids, between about 350 amino acids to about 780 amino acids, between about 350 amino acids to about 770 amino acids, between about 350 amino acids to about 760 amino acids, between about 350 amino acids to about 750 amino acids, between about 350 amino acids to about 740 amino acids, between about 350 amino acids to about 730 amino acids, between about 350 amino acids to about 720 amino acids, between about 350 amino acids to about 710 amino acids, between about 350 amino acids to about 700 amino acids, between about 350 amino acids to about 690 amino acids, between about 350 amino acids to about 680 amino acids, between 30 amino acids to about 670 amino acids, between about 350 amino acids to about 660 amino acids, between about 350 amino acids to about 650 amino acids, between about 350 amino acids to about 640 amino acids, between about 30 amino acids to about 630 amino acids, between about 350 amino acids to about 620 amino acids, between about 350 amino acids to about 610 amino acids, between about 350 amino acids to about 600 amino acids, between about 350 amino acids to about 590 amino acids, between about 350 amino acids to about 580 amino acids, between about 350 amino acids to about 570 amino acids, between about 350 amino acids to about 560 amino acids, between about 350 amino acids to about 550 amino acids, between about 350 amino acids to about 540 amino acids, between about 350 amino acids to about 530 amino acids, between about 350 amino acids to about 520 amino acids, between about 350 amino acids to about 510 amino acids, between about 350 amino acids to about 500 amino acids, between about 350 amino acids to about 490 amino acids, between about 350 amino acids to about 480 amino acids, between about 350 amino acids to about 470 amino acids, between about 350 amino acids to about 460 amino acids, between about 350 amino acids to about 450 amino acids, between about 350 amino acids to about 440 amino acids, between about 350 amino acids to about 430 amino acids, between about 350 amino acids to about 420 amino acids, between about 350 amino acids to about 410 amino acids, between about 350 amino acids to about 400 amino acids, between about 350 amino acids to about 390 amino acids, between about 350 amino acids to about 380 amino acids, between about 350 amino acids to about 370 amino acids, between about 350 amino acids to about 360 amino acids, between about 380 amino acids to about 800 amino acids, between about 380 amino acids to about 790 amino acids, between about 380 amino acids to about 780 amino acids, between about 380 amino acids to about 770 amino acids, between about 380 amino acids to about 760 amino acids, between about 380 amino acids to about 750 amino acids, between about 380 amino acids to about 740 amino acids, between about 380 amino acids to about 730 amino acids, between about 380 amino acids to about 720 amino acids, between about 380 amino acids to about 710 amino acids, between about 380 amino acids to about 700 amino acids, between about 380 amino acids to about 690 amino acids, between about 380 amino acids to about 680 amino acids, between 30 amino acids to about 670 amino acids, between about 380 amino acids to about 660 amino acids, between about 380 amino acids to about 650 amino acids, between about 380 amino acids to about 640 amino acids, between about 30 amino acids to about 630 amino acids, between about 380 amino acids to about 620 amino acids, between about 380 amino acids to about 610 amino acids, between about 380 amino acids to about 600 amino acids, between about 380 amino acids to about 590 amino acids, between about 380 amino acids to about 580 amino acids, between about 380 amino acids to about 570 amino acids, between about 380 amino acids to about 560 amino acids, between about 380 amino acids to about 550 amino acids, between about 380 amino acids to about 540 amino acids, between about 380 amino acids to about 530 amino acids, between about 380 amino acids to about 520 amino acids, between about 380 amino acids to about 510 amino acids, between about 380 amino acids to about 500 amino acids, between about 380 amino acids to about 490 amino acids, between about 380 amino acids to about 480 amino acids, between about 380 amino acids to about 470 amino acids, between about 380 amino acids to about 460 amino acids, between about 380 amino acids to about 450 amino acids, between about 380 amino acids to about 440 amino acids, between about 380 amino acids to about 430 amino acids, between about 380 amino acids to about 420 amino acids, between about 380 amino acids to about 410 amino acids, between about 380 amino acids to about 400 amino acids, between about 380 amino acids to about 390 amino acids, between about 400 amino acids to about 800 amino acids, between about 400 amino acids to about 790 amino acids, between about 400 amino acids to about 780 amino acids, between about 400 amino acids to about 770 amino acids, between about 400 amino acids to about 760 amino acids, between about 400 amino acids to about 750 amino acids, between about 400 amino acids to about 740 amino acids, between about 400 amino acids to about 730 amino acids, between about 400 amino acids to about 720 amino acids, between about 400 amino acids to about 710 amino acids, between about 400 amino acids to about 700 amino acids, between about 400 amino acids to about 690 amino acids, between about 400 amino acids to about 680 amino acids, between 30 amino acids to about 670 amino acids, between about 400 amino acids to about 660 amino acids, between about 400 amino acids to about 650 amino acids, between about 400 amino acids to about 640 amino acids, between about 30 amino acids to about 630 amino acids, between about 400 amino acids to about 620 amino acids, between about 400 amino acids to about 610 amino acids, between about 400 amino acids to about 600 amino acids, between about 400 amino acids to about 590 amino acids, between about 400 amino acids to about 580 amino acids, between about 400 amino acids to about 570 amino acids, between about 400 amino acids to about 560 amino acids, between about 400 amino acids to about 550 amino acids, between about 400 amino acids to about 540 amino acids, between about 400 amino acids to about 530 amino acids, between about 400 amino acids to about 520 amino acids, between about 400 amino acids to about 510 amino acids, between about 400 amino acids to about 500 amino acids, between about 400 amino acids to about 490 amino acids, between about 400 amino acids to about 480 amino acids, between about 400 amino acids to about 470 amino acids, between about 400 amino acids to about 460 amino acids, between about 400 amino acids to about 450 amino acids, between about 400 amino acids to about 440 amino acids, between about 400 amino acids to about 430 amino acids, between about 400 amino acids to about 420 amino acids, between about 400 amino acids to about 410 amino acids, between about 450 amino acids to about 800 amino acids, between about 450 amino acids to about 790 amino acids, between about 450 amino acids to about 780 amino acids, between about 450 amino acids to about 770 amino acids, between about 450 amino acids to about 760 amino acids, between about 450 amino acids to about 750 amino acids, between about 450 amino acids to about 740 amino acids, between about 450 amino acids to about 730 amino acids, between about 450 amino acids to about 720 amino acids, between about 450 amino acids to about 710 amino acids, between about 450 amino acids to about 700 amino acids, between about 450 amino acids to about 690 amino acids, between about 450 amino acids to about 680 amino acids, between 30 amino acids to about 670 amino acids, between about 450 amino acids to about 660 amino acids, between about 450 amino acids to about 650 amino acids, between about 450 amino acids to about 640 amino acids, between about 30 amino acids to about 630 amino acids, between about 450 amino acids to about 620 amino acids, between about 450 amino acids to about 610 amino acids, between about 450 amino acids to about 600 amino acids, between about 450 amino acids to about 590 amino acids, between about 450 amino acids to about 580 amino acids, between about 450 amino acids to about 570 amino acids, between about 450 amino acids to about 560 amino acids, between about 450 amino acids to about 550 amino acids, between about 450 amino acids to about 540 amino acids, between about 450 amino acids to about 530 amino acids, between about 450 amino acids to about 520 amino acids, between about 450 amino acids to about 510 amino acids, between about 450 amino acids to about 500 amino acids, between about 450 amino acids to about 490 amino acids, between about 450 amino acids to about 480 amino acids, between about 450 amino acids to about 470 amino acids, between about 450 amino acids to about 460 amino acids, between about 480 amino acids to about 800 amino acids, between about 480 amino acids to about 790 amino acids, between about 480 amino acids to about 780 amino acids, between about 480 amino acids to about 770 amino acids, between about 480 amino acids to about 760 amino acids, between about 480 amino acids to about 750 amino acids, between about 480 amino acids to about 740 amino acids, between about 480 amino acids to about 730 amino acids, between about 480 amino acids to about 720 amino acids, between about 480 amino acids to about 710 amino acids, between about 480 amino acids to about 700 amino acids, between about 480 amino acids to about 690 amino acids, between about 480 amino acids to about 680 amino acids, between 30 amino acids to about 670 amino acids, between about 480 amino acids to about 660 amino acids, between about 480 amino acids to about 650 amino acids, between about 480 amino acids to about 640 amino acids, between about 30 amino acids to about 630 amino acids, between about 480 amino acids to about 620 amino acids, between about 480 amino acids to about 610 amino acids, between about 480 amino acids to about 600 amino acids, between about 480 amino acids to about 590 amino acids, between about 480 amino acids to about 580 amino acids, between about 480 amino acids to about 570 amino acids, between about 480 amino acids to about 560 amino acids, between about 480 amino acids to about 550 amino acids, between about 480 amino acids to about 540 amino acids, between about 480 amino acids to about 530 amino acids, between about 480 amino acids to about 520 amino acids, between about 480 amino acids to about 510 amino acids, between about 480 amino acids to about 500 amino acids, between about 480 amino acids to about 490 amino acids, between about 50 amino acids to about 800 amino acids, between about 50 amino acids to about 790 amino acids, between about 50 amino acids to about 780 amino acids, between about 50 amino acids to about 770 amino acids, between about 50 amino acids to about 760 amino acids, between about 50 amino acids to about 750 amino acids, between about 50 amino acids to about 740 amino acids, between about 50 amino acids to about 730 amino acids, between about 50 amino acids to about 720 amino acids, between about 50 amino acids to about 710 amino acids, between about 50 amino acids to about 700 amino acids, between about 50 amino acids to about 690 amino acids, between about 50 amino acids to about 680 amino acids, between 30 amino acids to about 670 amino acids, between about 50 amino acids to about 660 amino acids, between about 50 amino acids to about 650 amino acids, between about 50 amino acids to about 640 amino acids, between about 30 amino acids to about 630 amino acids, between about 50 amino acids to about 620 amino acids, between about 50 amino acids to about 610 amino acids, between about 50 amino acids to about 600 amino acids, between about 50 amino acids to about 590 amino acids, between about 50 amino acids to about 580 amino acids, between about 50 amino acids to about 570 amino acids, between about 50 amino acids to about 560 amino acids, between about 50 amino acids to about 550 amino acids, between about 50 amino acids to about 540 amino acids, between about 50 amino acids to about 530 amino acids, between about 50 amino acids to about 520 amino acids, between about 50 amino acids to about 510 amino acids, between about 550 amino acids to about 800 amino acids, between about 550 amino acids to about 790 amino acids, between about 550 amino acids to about 780 amino acids, between about 550 amino acids to about 770 amino acids, between about 550 amino acids to about 760 amino acids, between about 550 amino acids to about 750 amino acids, between about 550 amino acids to about 740 amino acids, between about 550 amino acids to about 730 amino acids, between about 550 amino acids to about 720 amino acids, between about 550 amino acids to about 710 amino acids, between about 550 amino acids to about 700 amino acids, between about 550 amino acids to about 690 amino acids, between about 550 amino acids to about 680 amino acids, between 30 amino acids to about 670 amino acids, between about 550 amino acids to about 660 amino acids, between about 550 amino acids to about 650 amino acids, between about 550 amino acids to about 640 amino acids, between about 30 amino acids to about 630 amino acids, between about 550 amino acids to about 620 amino acids, between about 550 amino acids to about 610 amino acids, between about 550 amino acids to about 600 amino acids, between about 550 amino acids to about 590 amino acids, between about 550 amino acids to about 580 amino acids, between about 550 amino acids to about 570 amino acids, between about 550 amino acids to about 560 amino acids, between about 580 amino acids to about 800 amino acids, between about 580 amino acids to about 790 amino acids, between about 580 amino acids to about 780 amino acids, between about 580 amino acids to about 770 amino acids, between about 580 amino acids to about 760 amino acids, between about 580 amino acids to about 750 amino acids, between about 580 amino acids to about 740 amino acids, between about 580 amino acids to about 730 amino acids, between about 580 amino acids to about 720 amino acids, between about 580 amino acids to about 710 amino acids, between about 580 amino acids to about 700 amino acids, between about 580 amino acids to about 690 amino acids, between about 580 amino acids to about 680 amino acids, between 30 amino acids to about 670 amino acids, between about 580 amino acids to about 660 amino acids, between about 580 amino acids to about 650 amino acids, between about 580 amino acids to about 640 amino acids, between about 30 amino acids to about 630 amino acids, between about 580 amino acids to about 620 amino acids, between about 580 amino acids to about 610 amino acids, between about 580 amino acids to about 600 amino acids, between about 580 amino acids to about 590 amino acids, between about 600 amino acids to about 800 amino acids, between about 600 amino acids to about 790 amino acids, between about 600 amino acids to about 780 amino acids, between about 600 amino acids to about 770 amino acids, between about 600 amino acids to about 760 amino acids, between about 600 amino acids to about 750 amino acids, between about 600 amino acids to about 740 amino acids, between about 600 amino acids to about 730 amino acids, between about 600 amino acids to about 720 amino acids, between about 600 amino acids to about 710 amino acids, between about 600 amino acids to about 700 amino acids, between about 600 amino acids to about 690 amino acids, between about 600 amino acids to about 680 amino acids, between 30 amino acids to about 670 amino acids, between about 600 amino acids to about 660 amino acids, between about 600 amino acids to about 650 amino acids, between about 600 amino acids to about 640 amino acids, between about 30 amino acids to about 630 amino acids, between about 600 amino acids to about 620 amino acids, between about 600 amino acids to about 610 amino acids, between about 650 amino acids to about 800 amino acids, between about 650 amino acids to about 790 amino acids, between about 650 amino acids to about 780 amino acids, between about 650 amino acids to about 770 amino acids, between about 650 amino acids to about 760 amino acids, between about 650 amino acids to about 750 amino acids, between about 650 amino acids to about 740 amino acids, between about 650 amino acids to about 730 amino acids, between about 650 amino acids to about 720 amino acids, between about 650 amino acids to about 710 amino acids, between about 650 amino acids to about 700 amino acids, between about 650 amino acids to about 690 amino acids, between about 650 amino acids to about 680 amino acids, between 30 amino acids to about 670 amino acids, between about 650 amino acids to about 660 amino acids, between about 680 amino acids to about 800 amino acids, between about 680 amino acids to about 790 amino acids, between about 680 amino acids to about 780 amino acids, between about 680 amino acids to about 770 amino acids, between about 680 amino acids to about 760 amino acids, between about 680 amino acids to about 750 amino acids, between about 680 amino acids to about 740 amino acids, between about 680 amino acids to about 730 amino acids, between about 680 amino acids to about 720 amino acids, between about 680 amino acids to about 710 amino acids, between about 680 amino acids to about 700 amino acids, between about 680 amino acids to about 690 amino acids, between about 700 amino acids to about 800 amino acids, between about 700 amino acids to about 790 amino acids, between about 700 amino acids to about 780 amino acids, between about 700 amino acids to about 770 amino acids, between about 700 amino acids to about 760 amino acids, between about 700 amino acids to about 750 amino acids, between about 700 amino acids to about 740 amino acids, between about 700 amino acids to about 730 amino acids, between about 700 amino acids to about 720 amino acids, between about 700 amino acids to about 710 amino acids, between about 750 amino acids to about 800 amino acids, between about 750 amino acids to about 790 amino acids, between about 750 amino acids to about 780 amino acids, between about 750 amino acids to about 770 amino acids, between about 750 amino acids to about 760 amino acids, or between about 780 amino acids to about 800 amino acids) in length. In some examples, the second vector further includes a poly(A) sequence.

[0234] In some examples where the number of different vectors in the composition is two, the N-terminal portion encoded by one of the two vectors can include a portion including amino acid position 1 to about amino acid position 800, about amino acid position 790, about amino acid position 780, about amino acid position 770, about amino acid position 760, about amino acid position 750, about amino acid position 740, about amino acid position 730, about amino acid position 720, about amino acid position 710, about amino acid position 700, about amino acid position 690, about amino acid position 680, about amino acid position 670, about amino acid position 660, about amino acid position 650, about amino acid position 640, about amino acid position 630, about amino acid position 620, about amino acid position 610, about amino acid position 600, about amino acid position 590, about amino acid position 580, about amino acid position 570, about amino acid position 560, about amino acid position 550, about amino acid position 540, about amino acid position 530, about amino acid position 520, about amino acid position 510, about amino acid position 500, about amino acid position 490, about amino acid position 480, about amino acid position 470, about amino acid position 460, about amino acid position 450, about amino acid position 440, about amino acid position 430, about amino acid position 420, about amino acid position 410, about amino acid position 400, about amino acid position 390, about amino acid position 380, about amino acid position 370, about amino acid position 360, about amino acid position 350, about amino acid position 340, about amino acid position 330, about amino acid position 320, about amino acid position 310, about amino acid position 300, about amino acid position 290, about amino acid position 280, about amino acid position 270, about amino acid position 260, about amino acid position 250, about amino acid position 240, about amino acid position 230, about amino acid position 220, about amino acid position 210, about amino acid position 200, about amino acid position 190, about amino acid position 180, about amino acid position 170, about amino acid position 160, about amino acid position 150, about amino acid position 140, about amino acid position 130, about amino acid position 120, about amino acid position 110, about amino acid position 100, about amino acid position 90, about amino acid position 80, about amino acid position 70, about amino acid position 60, about amino acid position 50, or about amino acid position 40 of a wildtype hair cell target protein (e.g., SEQ ID NO: 8, SEQ ID NO: 9, SEQ ID NO: 10, SEQ ID NO: 11, SEQ ID NO: 12, SEQ ID NO: 20, SEQ ID NO: 23, SEQ ID NO: 24, SEQ ID NO: 25, SEQ ID NO: 26, SEQ ID NO: 27, SEQ ID NO: 28, SEQ ID NO: 30, SEQ ID NO: 31, SEQ ID NO: 32, SEQ ID NO: 34, SEQ ID NO: 39, SEQ ID NO: 41, SEQ ID NO: 43, SEQ ID NO: 45, SEQ ID NO: 48, SEQ ID NO: 51, SEQ ID NO: 53, SEQ ID NO: 55, SEQ ID NO: 57, SEQ ID NO: 59, SEQ ID NO: 61, SEQ ID NO: 64, SEQ ID NO: 66, SEQ ID NO: 68, SEQ ID NO: 69, SEQ ID NO: 70, SEQ ID NO: 72, SEQ ID NO: 74, SEQ ID NO: 76, SEQ ID NO: 77, SEQ ID NO: 78, or SEQ ID NO: 79).

[0235] In some examples where the number of different vectors in the composition is two, the N-terminal portion of the precursor hair cell target protein can include a portion including amino acid position 1 to amino acid position 300, amino acid position 1 to amino acid position 310, amino acid position 1 to about amino acid position 320, amino acid position 1 to about amino acid position 330, amino acid position 1 to about amino acid position 340, amino acid position 1 to about amino acid position 350, amino acid position 1 to about amino acid position 360, amino acid position 1 to about amino acid position 370, amino acid position 1 to about amino acid position 380, amino acid position 1 to about amino acid position 390, amino acid position 1 to about amino acid position 400, amino acid position 1 to about amino acid position 410, amino acid position 1 to about amino acid position 420, amino acid position 1 to about amino acid position 430, amino acid position 1 to about amino acid position 440, amino acid position 1 to about amino acid position 450, amino acid position 1 to about amino acid position 460, amino acid position 1 to about amino acid position 470, amino acid position 1 to about amino acid position 480, amino acid position 1 to about amino acid position 490, amino acid position 1 to about amino acid position 500, amino acid position 1 to about amino acid position 510, amino acid position 1 to about amino acid position 520, amino acid position 1 to about amino acid position 530, amino acid position 1 to about amino acid position 540, amino acid position 1 to about amino acid position 550, amino acid position 1 to about amino acid position 560, amino acid position 1 to about amino acid position 570, amino acid position 1 to about amino acid position 580, amino acid position 1 to about amino acid position 590, amino acid position 1 to about amino acid position 600, amino acid position 1 to about amino acid position 610, amino acid position 1 to about amino acid position 620, amino acid position 1 to about amino acid position 630, amino acid position 1 to about amino acid position 640, amino acid position 1 to about amino acid position 650, amino acid position 1 to about amino acid position 660, amino acid position 1 to about amino acid position 670, amino acid position 1 to about amino acid position 680, amino acid position 1 to about amino acid position 690, amino acid position 1 to about amino acid position 700, amino acid position 1 to about amino acid position 710, amino acid position 1 to about amino acid position 720, amino acid position 1 to about amino acid position 730, amino acid position 1 to about amino acid position 740, amino acid position 1 to about amino acid position 750, amino acid position 1 to about amino acid position 760, amino acid position 1 to about amino acid position 770, amino acid position 1 to about amino acid position 780, amino acid position 1 to about amino acid position 790, amino acid position 1 to about amino acid position 800 of a wildtype hair cell target protein (e.g., SEQ ID NO: 8, SEQ ID NO: 9, SEQ ID NO: 10, SEQ ID NO: 11, SEQ ID NO: 12, SEQ ID NO: 20, SEQ ID NO: 23, SEQ ID NO: 24, SEQ ID NO: 25, SEQ ID NO: 26, SEQ ID NO: 27, SEQ ID NO: 28, SEQ ID NO: 30, SEQ ID NO: 31, SEQ ID NO: 32, SEQ ID NO: 34, SEQ ID NO: 35, SEQ ID NO: 41, SEQ ID NO: 43, SEQ ID NO: 45, SEQ ID NO: 48, SEQ ID NO: 51, SEQ ID NO: 53, SEQ ID NO: 55, SEQ ID NO: 57, SEQ ID NO: 59, SEQ ID NO: 61, SEQ ID NO: 64, SEQ ID NO: 66, SEQ ID NO: 68, SEQ ID NO: 69, SEQ ID NO: 70, SEQ ID NO: 72, SEQ ID NO: 74, SEQ ID NO: 76, SEQ ID NO: 77, SEQ ID NO: 78, SEQ ID NO: 79).

[0236] In some examples where the number of different vectors in the composition is two, the N-terminal portion encoded by one of the two vectors can include a portion including amino acid position 1 to about amino acid position 800, about amino acid position 790, about amino acid position 780, about amino acid position 770, about amino acid position 760, about amino acid position 750, about amino acid position 740, about amino acid position 730, about amino acid position 720, about amino acid position 710, about amino acid position 700, about amino acid position 690, about amino acid position 680, about amino acid position 670, about amino acid position 660, about amino acid position 650, about amino acid position 640, about amino acid position 630, about amino acid position 620, about amino acid position 610, about amino acid position 600, about amino acid position 590, about amino acid position 580, about amino acid position 570, about amino acid position 560, about amino acid position 550, about amino acid position 540, about amino acid position 530, about amino acid position 520, about amino acid position 510, about amino acid position 500, about amino acid position 490, about amino acid position 480, about amino acid position 470, about amino acid position 460, about amino acid position 450, about amino acid position 440, about amino acid position 430, about amino acid position 420, about amino acid position 410, about amino acid position 400, about amino acid position 390, about amino acid position 380, about amino acid position 370, about amino acid position 360, about amino acid position 350, about amino acid position 340, about amino acid position 330, about amino acid position 320, about amino acid position 310, about amino acid position 300, about amino acid position 290, about amino acid position 280, about amino acid position 270, about amino acid position 260, about amino acid position 250, about amino acid position 240, about amino acid position 230, about amino acid position 220, about amino acid position 210, about amino acid position 200, about amino acid position 190, about amino acid position 180, about amino acid position 170, about amino acid position 160, about amino acid position 150, about amino acid position 140, about amino acid position 130, about amino acid position 120, about amino acid position 110, about amino acid position 100, about amino acid position 90, about amino acid position 80, about amino acid position 70, about amino acid position 60, about amino acid position 50, or about amino acid position 40 of a wildtype supporting cell target protein (e.g., SEQ ID NO: 1 or SEQ ID NO: 4).

[0237] In some examples where the number of different vectors in the composition is two, the N-terminal portion of the precursor supporting cell target protein can include a portion including amino acid position 1 to amino acid position 300, amino acid position 1 to amino acid position 310, amino acid position 1 to about amino acid position 320, amino acid position 1 to about amino acid position 330, amino acid position 1 to about amino acid position 340, amino acid position 1 to about amino acid position 350, amino acid position 1 to about amino acid position 360, amino acid position 1 to about amino acid position 370, amino acid position 1 to about amino acid position 380, amino acid position 1 to about amino acid position 390, amino acid position 1 to about amino acid position 400, amino acid position 1 to about amino acid position 410, amino acid position 1 to about amino acid position 420, amino acid position 1 to about amino acid position 430, amino acid position 1 to about amino acid position 440, amino acid position 1 to about amino acid position 450, amino acid position 1 to about amino acid position 460, amino acid position 1 to about amino acid position 470, amino acid position 1 to about amino acid position 480, amino acid position 1 to about amino acid position 490, amino acid position 1 to about amino acid position 500, amino acid position 1 to about amino acid position 510, amino acid position 1 to about amino acid position 520, amino acid position 1 to about amino acid position 530, amino acid position 1 to about amino acid position 540, amino acid position 1 to about amino acid position 550, amino acid position 1 to about amino acid position 560, amino acid position 1 to about amino acid position 570, amino acid position 1 to about amino acid position 580, amino acid position 1 to about amino acid position 590, amino acid position 1 to about amino acid position 600, amino acid position 1 to about amino acid position 610, amino acid position 1 to about amino acid position 620, amino acid position 1 to about amino acid position 630, amino acid position 1 to about amino acid position 640, amino acid position 1 to about amino acid position 650, amino acid position 1 to about amino acid position 660, amino acid position 1 to about amino acid position 670, amino acid position 1 to about amino acid position 680, amino acid position 1 to about amino acid position 690, amino acid position 1 to about amino acid position 700, amino acid position 1 to about amino acid position 710, amino acid position 1 to about amino acid position 720, amino acid position 1 to about amino acid position 730, amino acid position 1 to about amino acid position 740, amino acid position 1 to about amino acid position 750, amino acid position 1 to about amino acid position 760, amino acid position 1 to about amino acid position 770, amino acid position 1 to about amino acid position 780, amino acid position 1 to about amino acid position 790, amino acid position 1 to about amino acid position 800 of a wildtype supporting cell target protein (e.g., SEQ ID NO: 1 or SEQ ID NO: 4).

[0238] As used herein, the term “vector” means a composition including a polynucleotide capable of carrying at least one exogenous nucleic acid fragment, e.g., a plasmid vector, a transposon, a cosmid, an artificial chromosome (e.g., a human artificial chromosome (HAC), a yeast artificial chromosome (YAC), a bacterial artificial chromosome (BAC), or a P1-derived artificial chromosome (PAC)) or a viral vector (e.g., any adenoviral vectors (e.g., pSV or pCMV vectors), any retroviral vectors as described herein) and any Gateway® vectors. A vector can, e.g., include sufficient cis-acting elements for expression; other elements for expression can be supplied by the host primate cell or in an in vitro expression system. The term “vector” includes any genetic element (e.g., a plasmid, a transposon, a cosmid, an artificial chromosome, or a viral vector, etc.) that is capable of replicating when associated with the proper control elements. Thus, the term includes cloning and expression vectors, as well as viral vectors (e.g., an adeno-associated virus (AAV) vector, an adenovirus vector, a lentivirus vector, or a retrovirus vector).

[0239] Vectors include all those known in the art, including cosmids, plasmids (e.g., naked or contained in liposomes) and viruses (e.g., lentiviruses, retroviruses, adenoviruses, and adeno-associated viruses) that incorporate the recombinant polynucleotide. Skilled practitioners will be capable of selecting suitable vectors and primate cells for making any of the nucleic acids described herein.

In some embodiments the vector is a plasmid (i.e. a circular DNA molecule that can autonomously replicate inside a cell). In some embodiments, the vector can be a cosmid (e.g., pWE and sCos series (Wahl et al. (1987), Evans et al. (1989)).

[0240] In some embodiments, the vector(s) is a viral vector (e.g., adeno-associated virus, adenovirus, lentivirus, and retrovirus). Non-limiting examples of viral vectors are described herein. In some embodiments, the vector(s) is an adeno-associated viral vector (AAV) (see, e.g., Asokan et al., Mol. Ther. 20: 699-7080, 2012). “Recombinant AAV vectors” or “rAAVs” are typically composed of, at a minimum, a transgene or a portion thereof and a regulatory sequence, and optionally 5′ and 3′ AAV inverted terminal repeats (ITRs). Such a recombinant AAV vector is packaged into a capsid and delivered to a selected target cell (e.g., an outer hair cell).

[0241] The AAV sequences of the vector typically include the cis-acting 5′ and 3′ ITR sequences (See, e.g., B. J. Carter, in “Handbook of Parvoviruses”, ed., P. Tijsser, CRC Press, pp. 155 168, 1990). Typical AAV ITR sequences are about 145 nucleotides in length. In some embodiments, at least 75% of a typical ITR sequence (e.g., at least 80%, at least 85%, at least 90%, or at least 95%) is incorporated into the AAV vector. The ability to modify these ITR sequences is within the skill of the art. (See, e.g., texts such as Sambrook et al., “Molecular Cloning. A Laboratory Manual”, 2d ed., Cold Spring Harbor Laboratory, New York, 1989; and K. Fisher et al., J Virol. 70:520 532, 1996). In some embodiments, any of the coding sequences described herein are flanked by 5′ and 3′ AAV ITR sequences in the AAV vectors. The AAV ITR sequences may be obtained from any known AAV, including presently identified AAV types.

[0242] AAV vectors as described herein may include any of the regulatory elements described herein (e.g., one or more of a promoter, a polyA sequence, and an IRES).

[0243] In some embodiments, the AAV vector is selected from the group consisting of: an AAV1 vector, an AAV2 vector, an AAV3 vector, an AAV4 vector, an AAV5 vector, an AAV6 vector, an AAV7 vector, an AAV8 vector, an AAV9 vector, an AAV2.7m8 vector, an AAV8BP2 vector, and an AAV293 vector. Additional exemplary AAV vectors that can be used herein are known in the art. See, e.g., Kanaan et al., Mol. Ther. Nucleic Acids 8:184-197, 2017; Li et al., Mol. Ther. 16(7): 1252-1260; Adachi et al., Nat. Commun. 5: 3075, 2014; Isgrig et al., Nat. Commun. 10(1): 427, 2019; and Gao et al., J. Virol. 78(12): 6381-6388.

[0244] In some embodiments, the vector(s) is an adenovirus (see, e.g., Dmitriev et al. (1998) J. Virol. 72: 9706-9713; and Poulin et al., J. Virol 8: 10074-10086, 2010). In some embodiments, the vector(s) is a retrovirus (see, e.g., Maier et al. (2010) Future Microbiol 5: 1507-23).

[0245] The vectors provided herein can be of different sizes. The choice of vector that is used in any of the compositions, kits, and methods described herein may depend on the size of the vector.

[0246] In some embodiments, the vector(s) is a plasmid and can include a total length of up to about 1 kb, up to about 2 kb, up to about 3 kb, up to about 4 kb, up to about 5 kb, up to about 6 kb, up to about 7 kb, up to about 8 kb, up to about 9 kb, up to about 10 kb, up to about 11 kb, up to about 12 kb, up to about 13 kb, up to about 14 kb, or up to about 15 kb. In some embodiments, the vector(s) is a plasmid and can have a total length in a range of about 1 kb to about 2 kb, about 1 kb to about 3 kb, about 1 kb to about 4 kb, about 1 kb to about 5 kb, about 1 kb to about 6 kb, about 1 kb to about 7 kb, about 1 kb to about 8 kb, about 1 kb to about 9 kb, about 1 kb to about 10 kb, about 1 kb to about 11 kb, about 1 kb to about 12 kb, about 1 kb to about 13 kb, about 1 kb to about 14 kb, or about 1 kb to about 15 kb.

[0247] In some embodiments, the vector(s) is a viral vector and can have a total number of nucleotides of up to 10 kb. In some embodiments, the viral vector(s) can have a total number of nucleotides in the range of about 1 kb to about 2 kb, 1 kb to about 3 kb, about 1 kb to about 4 kb, about 1 kb to about 5 kb, about 1 kb to about 6 kb, about 1 kb to about 7 kb, about 1 kb to about 8 kb, about 1 kb to about 9 kb, about 1 kb to about 10 kb, about 2 kb to about 3 kb, about 2 kb to about 4 kb, about 2 kb to about 5 kb, about 2 kb to about 6 kb, about 2 kb to about 7 kb, about 2 kb to about 8 kb, about 2 kb to about 9 kb, about 2 kb to about 10 kb, about 3 kb to about 4 kb, about 3 kb to about 5 kb, about 3 kb to about 6 kb, about 3 kb to about 7 kb, about 3 kb to about 8 kb, about 3 kb to about 9 kb, about 3 kb to about 10 kb, about 4 kb to about 5 kb, about 4 kb to about 6 kb, about 4 kb to about 7 kb, about 4 kb to about 8 kb, about 4 kb to about 9 kb, about 4 kb to about 10 kb, about 5 kb to about 6 kb, about 5 kb to about 7 kb, about 5 kb to about 8 kb, about 5 kb to about 9 kb, about 5 kb to about 10 kb, about 6 kb to about 7 kb, about 6 kb to about 8 kb, about 6 kb to about 9 kb, about 6 kb to about 10 kb, about 7 kb to about 8 kb, about 7 kb to about 9 kb, about 7 kb to about 10 kb, about 8 kb to about 9 kb, about 8 kb to about 10 kb, or about 9 kb to about 10 kb.

[0248] In some embodiments, the vector(s) is a lentivirus and can have a total number of nucleotides of up to 8 kb. In some examples, the lentivirus(es) can have a total number of nucleotides of about 1 kb to about 2 kb, about 1 kb to about 3 kb, about 1 kb to about 4 kb, about 1 kb to about 5 kb, about 1 kb to about 6 kb, about 1 kb to about 7 kb, about 1 kb to about 8 kb, about 2 kb to about 3 kb, about 2 kb to about 4 kb, about 2 kb to about 5 kb, about 2 kb to about 6 kb, about 2 kb to about 7 kb, about 2 kb to about 8 kb, about 3 kb to about 4 kb, about 3 kb to about 5 kb, about 3 kb to about 6 kb, about 3 kb to about 7 kb, about 3 kb to about 8 kb, about 4 kb to about 5 kb, about 4 kb to about 6 kb, about 4 kb to about 7 kb, about 4 kb to about 8 kb, about 5 kb to about 6 kb, about 5 kb to about 7 kb, about 5 kb to about 8 kb, about 6 kb to about 8 kb, about 6 kb to about 7 kb, or about 7 kb to about 8 kb.

[0249] In some embodiments, the vector(s) is an adenovirus and can have a total number of nucleotides of up to 8 kb. In some embodiments, the adenovirus(es) can have a total number of nucleotides in the range of about 1 kb to about 2 kb, about 1 kb to about 3 kb, about 1 kb to about 4 kb, about 1 kb to about 5 kb, about 1 kb to about 6 kb, about 1 kb to about 7 kb, about 1 kb to about 8 kb, about 2 kb to about 3 kb, about 2 kb to about 4 kb, about 2 kb to about 5 kb, about 2 kb to about 6 kb, about 2 kb to about 7 kb, about 2 kb to about 8 kb, about 3 kb to about 4 kb, about 3 kb to about 5 kb, about 3 kb to about 6 kb, about 3 kb to about 7 kb, about 3 kb to about 8 kb, about 4 kb to about 5 kb, about 4 kb to about 6 kb, about 4 kb to about 7 kb, about 4 kb to about 8 kb, about 5 kb to about 6 kb, about 5 kb to about 7 kb, about 5 kb to about 8 kb, about 6 kb to about 7 kh, about 6 kb to about 8 kb, or about 7 kb to about 8 kb.

[0250] In some embodiments, the vector(s) is an adeno-associated virus (AAV vector) and can include a total number of nucleotides of up to 5 kb. In some embodiments, the AAV vector(s) can include a total number of nucleotides in the range of about 1 kb to about 2 kb, about 1 kb to about 3 kb, about 1 kb to about 4 kb, about 1 kb to about 5 kb, about 2 kb to about 3 kb, about 2 kb to about 4 kb, about 2 kb to about 5 kb, about 3 kb to about 4 kb, about 3 kb to about 5 kb, or about 4 kb to about 5 kb.

[0251] In some embodiments of any of the compositions, kits, and methods provided herein, the at least two different vectors can be substantially the same type of vector and may differ in size. In some embodiments, the at least two different vectors can be different types of vector, and may have substantially the same size or have different sizes.

[0252] In some embodiments, any of the at least two vectors can have a total number of nucleotides in the range of about 500 nucleotides to about 10,000 nucleotides, about 500 nucleotides to about 9,500 nucleotides, about 500 nucleotides to about 9,000 nucleotides, about 500 nucleotides to about 8,500 nucleotides, about 500 nucleotides to about 8,000 nucleotides, about 500 nucleotides to about 7,800 nucleotides, about 500 nucleotides to about 7,600 nucleotides, about 500 nucleotides to about 7,400 nucleotides, about 500 nucleotides to about 7,200 nucleotides, about 500 nucleotides to about 7,000 nucleotides, about 500 nucleotides to about 6,800 nucleotides, about 500 nucleotides to about 6,600 nucleotides, about 500 nucleotides to about 6,400 nucleotides, about 500 nucleotides to about 6,200 nucleotides, about 500 nucleotides to about 6,000 nucleotides, about 500 nucleotides to about 5,800 nucleotides, about 500 nucleotides to about 5,600 nucleotides, about 500 nucleotides to about 5,400 nucleotides, about 500 nucleotides to about 5,200 nucleotides, about 500 nucleotides to about 5,000 nucleotides, about 500 nucleotides to about 4,800 nucleotides, about 4,600 nucleotides, about 500 nucleotides to about 4,400 nucleotides, about 500 nucleotides to about 4,200 nucleotides, about 500 nucleotides to about 4,000 nucleotides, about 500 nucleotides to about 3,800 nucleotides, about 500 nucleotides to about 3,600 nucleotides, about 500 nucleotides to about 3,400 nucleotides, about 500 nucleotides to about 3,200 nucleotides, about 500 nucleotides to about 3,000 nucleotides, about 500 nucleotides to about 2,800 nucleotides, about 500 nucleotides to about 2,600 nucleotides, about 500 nucleotides to about 2,400 nucleotides, about 500 nucleotides to about 2,200 nucleotides, about 500 nucleotides to about 2,000 nucleotides, about 500 nucleotides to about 1,800 nucleotides, about 500 nucleotides to about 1,600 nucleotides, about 500 nucleotides to about 1,400 nucleotides, about 500 nucleotides to about 1,200 nucleotides, about 500 nucleotides to about 1,000 nucleotides, about 500 nucleotides to about 800 nucleotides, about 800 nucleotides to about 10,000 nucleotides, about 800 nucleotides to about 9,500 nucleotides, about 800 nucleotides to about 9,000 nucleotides, about 800 nucleotides to about 8,500 nucleotides, about 800 nucleotides to about 8,000 nucleotides, about 800 nucleotides to about 7,800 nucleotides, about 800 nucleotides to about 7,600 nucleotides, about 800 nucleotides to about 7,400 nucleotides, about 800 nucleotides to about 7,200 nucleotides, about 800 nucleotides to about 7,000 nucleotides, about 800 nucleotides to about 6,800 nucleotides, about 800 nucleotides to about 6,600 nucleotides, about 800 nucleotides to about 6,400 nucleotides, about 800 nucleotides to about 6,200 nucleotides, about 800 nucleotides to about 6,000 nucleotides, about 800 nucleotides to about 5,800 nucleotides, about 800 nucleotides to about 5,600 nucleotides, about 800 nucleotides to about 5,400 nucleotides, about 800 nucleotides to about 5,200 nucleotides, about 800 nucleotides to about 5,000 nucleotides, about 800 nucleotides to about 4,800 nucleotides, about 800 nucleotides to about 4,600 nucleotides, about 800 nucleotides to about 4,400 nucleotides, about 800 nucleotides to about 4,200 nucleotides, about 800 nucleotides to about 4,000 nucleotides, about 800 nucleotides to about 3,800 nucleotides, about 800 nucleotides to about 3,600 nucleotides, about 800 nucleotides to about 3,400 nucleotides, about 800 nucleotides to about 3,200 nucleotides, about 800 nucleotides to about 3,000 nucleotides, about 800 nucleotides to about 2,800 nucleotides, about 800 nucleotides to about 2,600 nucleotides, about 800 nucleotides to about 2,400 nucleotides, about 800 nucleotides to about 2,200 nucleotides, about 800 nucleotides to about 2,000 nucleotides, about 800 nucleotides to about 1,800 nucleotides, about 800 nucleotides to about 1,600 nucleotides, about 800 nucleotides to about 1,400 nucleotides, about 800 nucleotides to about 1,200 nucleotides, about 800 nucleotides to about 1,000 nucleotides, about 1,000 nucleotides to about 10,000 nucleotides, about 1,000 nucleotides to about 9,000 nucleotides, about 1,000 nucleotides to about 8,500 nucleotides, about 1,000 nucleotides to about 8,000 nucleotides, about 1,000 nucleotides to about 7,800 nucleotides, about 1,000 nucleotides to about 7,600 nucleotides, about 1,000 nucleotides to about 7,400 nucleotides, about 1,000 nucleotides to about 7,200 nucleotides, about 1,000 nucleotides to about 7,000 nucleotides, about 1,000 nucleotides to about 6,800 nucleotides, about 1,000 nucleotides to about 6,600 nucleotides, about 1,000 nucleotides to about 6,400 nucleotides, about 1,000 nucleotides to about 6,200 nucleotides, about 1,000 nucleotides to about 6,000 nucleotides, about 1,000 nucleotides to about 5,800 nucleotides, about 1,000 nucleotides to about 5,600 nucleotides, about 1,000 nucleotides to about 5,400 nucleotides, about 1,000 nucleotides to about 5,200 nucleotides, about 1,000 nucleotides to about 5,000 nucleotides, about 1,000 nucleotides to about 4,800 nucleotides, about 1,000 nucleotides to about 4,600 nucleotides, about 1,000 nucleotides to about 4,400 nucleotides, about 1,000 nucleotides to about 4,200 nucleotides, about 1,000 nucleotides to about 4,000 nucleotides, about 1,000 nucleotides to about 3,800 nucleotides, about 1,000 nucleotides to about 3,600 nucleotides, about 1,000 nucleotides to about 3,400 nucleotides, about 1,000 nucleotides to about 3,200 nucleotides, about 1,000 nucleotides to about 3,000 nucleotides, about 1,000 nucleotides to about 2,600 nucleotides, about 1,000 nucleotides to about 2,400 nucleotides, about 1,000 nucleotides to about 2,200 nucleotides, about 1,000 nucleotides to about 2,000 nucleotides, about 1,000 nucleotides to about 1,800 nucleotides, about 1,000 nucleotides to about 1,600 nucleotides, about 1,000 nucleotides to about 1,400 nucleotides, about 1,000 nucleotides to about 1,200 nucleotides, about 1,200 nucleotides to about 10,000 nucleotides, about 1,200 nucleotides to about 9,500 nucleotides, about 1,200 nucleotides to about 9,000 nucleotides, about 1,200 nucleotides to about 8,500 nucleotides, about 1,200 nucleotides to about 8,000 nucleotides, about 1,200 nucleotides to about 7,800 nucleotides, about 1,200 nucleotides to about 7,600 nucleotides, about 1,200 nucleotides to about 7,400 nucleotides, about 1,200 nucleotides to about 7,200 nucleotides, about 1,200 nucleotides to about 7,000 nucleotides, about 1,200 nucleotides to about 6,800 nucleotides, about 1,200 nucleotides to about 6,600 nucleotides, about 1,200 nucleotides to about 6,400 nucleotides, about 1,200 nucleotides to about 6,200 nucleotides, about 1,200 nucleotides to about 6,000 nucleotides, about 1,200 nucleotides to about 5,800 nucleotides, about 1,200 nucleotides to about 5,600 nucleotides, about 1,200 nucleotides to about 5,400 nucleotides, about 1,200 nucleotides to about 5,000 nucleotides, about 1,200 nucleotides to about 4,800 nucleotides, about 1,200 nucleotides to about 4,600 nucleotides, about 1,200 nucleotides to about 4,400 nucleotides, about 1,200 nucleotides to about 4,200 nucleotides, about 1,200 nucleotides to about 4,000 nucleotides, about 1,200 nucleotides to about 3,800 nucleotides, about 1,200 nucleotides to about 3,600 nucleotides, about 1,200 nucleotides to about 3,400 nucleotides, about 1,200 nucleotides to about 3,200 nucleotides, about 1,200 nucleotides to about 3,000 nucleotides, about 1,200 nucleotides to about 2,800 nucleotides, about 1,200 nucleotides to about 2,600 nucleotides, about 1,200 nucleotides to about 2,400 nucleotides, about 1,200 nucleotides to about 2,200 nucleotides, about 1,200 nucleotides to about 2,000 nucleotides, about 1,200 nucleotides to about 1,800 nucleotides, about 1,200 nucleotides to about 1,600 nucleotides, about 1,200 nucleotides to about 1,400 nucleotides, about 1,400 nucleotides to about 10,000 nucleotides, about 1,400 nucleotides to about 9,500 nucleotides, about 1,400 nucleotides to about 9,000 nucleotides, about 1,400 nucleotides to about 8,500 nucleotides, about 1,400 nucleotides to about 8,000 nucleotides, about 1,400 nucleotides to about 7,800 nucleotides, about 1,400 nucleotides to about 7,600 nucleotides, about 1,400 nucleotides to about 7,400 nucleotides, about 1,400 nucleotides to about 7,200 nucleotides, about 1,400 nucleotides to about 7,000 nucleotides, about 1,400 nucleotides to about 6,800 nucleotides, about 1,400 nucleotides to about 6,600 nucleotides, about 1,400 nucleotides to about 6,400 nucleotides, about 1,400 nucleotides to about 6,200 nucleotides, about 1,400 nucleotides to about 6,000 nucleotides, about 1,400 nucleotides to about 5,800 nucleotides, about 1,400 nucleotides to about 5,600 nucleotides, about 1,400 nucleotides to about 5,400 nucleotides, about 1,400 nucleotides to about 5,200 nucleotides, about 1,400 nucleotides to about 5,000 nucleotides, about 1,400 nucleotides to about 4,800 nucleotides, about 1,400 nucleotides to about 4,600 nucleotides, about 1,400 nucleotides to about 4,400 nucleotides, about 1,400 nucleotides to about 4,200 nucleotides, about 1,400 nucleotides to about 4,000 nucleotides, about 1,400 nucleotides to about 3,800 nucleotides, about 1,400 nucleotides to about 3,600 nucleotides, about 1,400 nucleotides to about 3,400 nucleotides, about 1,400 nucleotides to about 3,200 nucleotides, about 1,400 nucleotides to about 3,000 nucleotides, about 1,400 nucleotides to about 2,600 nucleotides, about 1,400 nucleotides to about 2,400 nucleotides, about 1,400 nucleotides to about 2,200 nucleotides, about 1,400 nucleotides to about 2,000 nucleotides, about 1,400 nucleotides to about 1,800 nucleotides, about 1,400 nucleotides to about 1,600 nucleotides, about 1,600 nucleotides to about 10,000 nucleotides, about 1,600 nucleotides to about 9,500 nucleotides, about 1,600 nucleotides to about 9,000 nucleotides, about 1,600 nucleotides to about 8,500 nucleotides, about 1,600 nucleotides to about 8,000 nucleotides, about 1,600 nucleotides to about 7,800 nucleotides, about 1,600 nucleotides to about 7,600 nucleotides, about 1,600 nucleotides to about 7,400 nucleotides, about 1,600 nucleotides to about 7,200 nucleotides, about 1,600 nucleotides to about 7,000 nucleotides, about 1,600 nucleotides to about 6,800 nucleotides, about 1,600 nucleotides to about 6,400 nucleotides, about 1,600 nucleotides to about 6,200 nucleotides, about 1,600 nucleotides to about 6,000 nucleotides, about 1,600 nucleotides to about 5,800 nucleotides, about 1,600 nucleotides to about 5,600 nucleotides, about 1,600 nucleotides to about 5,400 nucleotides, about 1,600 nucleotides to about 5,200 nucleotides, about 1,600 nucleotides to about 5,000 nucleotides, about 1,600 nucleotides to about 4,800 nucleotides, about 1,600 nucleotides to about 4,600 nucleotides, about 1,600 nucleotides to about 4,400 nucleotides, about 1,600 nucleotides to about 4,200 nucleotides, about 1,600 nucleotides to about 4,000 nucleotides, about 1,600 nucleotides to about 3,800 nucleotides, about 1,600 nucleotides to about 3,600 nucleotides, about 1,600 nucleotides to about 3,400 nucleotides, about 1,600 nucleotides to about 3,200 nucleotides, about 1,600 nucleotides to about 3,000 nucleotides, about 1,600 nucleotides to about 2,800 nucleotides, about 1,600 nucleotides to about 2,600 nucleotides, about 1,600 nucleotides to about 2,400 nucleotides, about 1,600 nucleotides to about 2,200 nucleotides, about 1,600 nucleotides to about 2,000 nucleotides, about 1,600 nucleotides to about 1,800 nucleotides, about 1,800 nucleotides to about 10,000 nucleotides, about 1,800 nucleotides to about 9,500 nucleotides, about 1,800 nucleotides to about 9,000 nucleotides, about 1,800 nucleotides to about 8,500 nucleotides, about 1,800 nucleotides to about 8,000 nucleotides, about 1,800 nucleotides to about 7,800 nucleotides, about 1,800 nucleotides to about 7,600 nucleotides, about 1,800 nucleotides to about 7,400 nucleotides, about 1,800 nucleotides to about 7,200 nucleotides, about 1,800 nucleotides to about 7,000 nucleotides, about 1,800 nucleotides to about 6,800 nucleotides, about 1,800 nucleotides to about 6,600 nucleotides, about 1,800 nucleotides to about 6,400 nucleotides, about 1,800 nucleotides to about 6,200 nucleotides, about 1,800 nucleotides to about 6,000 nucleotides, about 1,800 nucleotides to about 5,800 nucleotides, about 1,800 nucleotides to about 5,600 nucleotides, about 1,800 nucleotides to about 5,400 nucleotides, about 1,800 nucleotides to about 5,200 nucleotides, about 1,800 nucleotides to about 5,000 nucleotides, about 1,800 nucleotides to about 4,800 nucleotides, about 1,800 nucleotides to about 4,600 nucleotides, about 1,800 nucleotides to about 4,400 nucleotides, about 1,800 nucleotides to about 4,200 nucleotides, about 1,800 nucleotides to about 4,000 nucleotides, about 1,800 nucleotides to about 3,800 nucleotides, about 1,800 nucleotides to about 3,600 nucleotides, about 1,800 nucleotides to about 3,400 nucleotides, about 1,800 nucleotides to about 3,200 nucleotides, about 1,800 nucleotides to about 3,000 nucleotides, about 1,800 nucleotides to about 2,800 nucleotides, about 1,800 nucleotides to about 2,600 nucleotides, about 1,800 nucleotides to about 2,400 nucleotides, about 1,800 nucleotides to about 2,200 nucleotides, about 1,800 nucleotides to about 2,000 nucleotides, about 2,000 nucleotides to about 10,000 nucleotides, about 2,000 nucleotides to about 9,500 nucleotides, about 2,000 nucleotides to about 9,000 nucleotides, about 2,000 nucleotides to about 8,500 nucleotides, about 2,000 nucleotides to about 8,000 nucleotides, about 2,000 nucleotides to about 7,800 nucleotides, about 2,000 nucleotides to about 7,600 nucleotides, about 2,000 nucleotides to about 7,400 nucleotides, about 2,000 nucleotides to about 7,200 nucleotides, about 2,000 nucleotides to about 7,000 nucleotides, about 2,000 nucleotides to about 6,800 nucleotides, about 2,000 nucleotides to about 6,600 nucleotides, about 2,000 nucleotides to about 6,400 nucleotides, about 2,000 nucleotides to about 6,200 nucleotides, about 2,000 nucleotides to about 6,000 nucleotides, about 2,000 nucleotides to about 5,800 nucleotides, about 2,000 nucleotides to about 5,600 nucleotides, about 2,000 nucleotides to about 5,400 nucleotides, about 2,000 nucleotides to about 5,200 nucleotides, about 2,000 nucleotides to about 5,000 nucleotides, about 2,000 nucleotides to about 4,800 nucleotides, about 2,000 nucleotides to about 4,600 nucleotides, about 2,000 nucleotides to about 4,400 nucleotides, about 2,000 nucleotides to about 4,200 nucleotides, about 2,000 nucleotides to about 4,000 nucleotides, about 2,000 nucleotides to about 3,800 nucleotides, about 2,000 nucleotides to about 3,600 nucleotides, about 2,000 nucleotides to about 3,400 nucleotides, about 2,000 nucleotides to about 3,200 nucleotides, about 2,000 nucleotides to about 3,000 nucleotides, about 2,000 nucleotides to about 2,800 nucleotides, about 2,000 nucleotides to about 2,600 nucleotides, about 2,000 nucleotides to about 2,400 nucleotides, about 2,000 nucleotides to about 2,200 nucleotides, about 2,200 nucleotides to about 10,000 nucleotides, about 9,500 nucleotides, about 9,000 nucleotides, about 8,500 nucleotides, about 8,000 nucleotides, about 7,800 nucleotides, about 7,600 nucleotides, about 7,400 nucleotides, about 7,200 nucleotides, about 7,000 nucleotides, about 6,800 nucleotides, about 6,600 nucleotides, about 6,400 nucleotides, about 6,200 nucleotides, about 6,000 nucleotides, about 5,800 nucleotides, about 5,600 nucleotides, about 5,400 nucleotides, about 5,200 nucleotides, about 5,000 nucleotides, about 4,800 nucleotides, about 4,600 nucleotides, about 4,400 nucleotides, about 4,200 nucleotides, about 4,000 nucleotides, about 3,800 nucleotides, about 3,600 nucleotides, about 3,400 nucleotides, about 3,200 nucleotides, about 3,000 nucleotides, about 2,800 nucleotides, about 2,600 nucleotides, about 2,400 nucleotides, about 2,400 nucleotides to about 10,000 nucleotides, about 2,400 nucleotides to about 9,500 nucleotides, about 2,400 nucleotides to about 9,000 nucleotides, about 2,400 nucleotides to about 8,500 nucleotides, about 2,400 nucleotides to about 8,000 nucleotides, about 2,400 nucleotides to about 7,800 nucleotides, about 2,400 nucleotides to about 7,600 nucleotides, about 2,400 nucleotides to about 7,400 nucleotides, about 2,400 nucleotides to about 7,200 nucleotides, about 2,400 nucleotides to about 7,000 nucleotides, about 2,400 nucleotides to about 6,800 nucleotides, about 2,400 nucleotides to about 6,600 nucleotides, about 2,400 nucleotides to about 6,400 nucleotides, about 2,400 nucleotides to about 6,200 nucleotides, about 2,400 nucleotides to about 6,000 nucleotides, about 2,400 nucleotides to about 5,800 nucleotides, about 2,400 nucleotides to about 5,600 nucleotides, about 2,400 nucleotides to about 5,400 nucleotides, about 2,400 nucleotides to about 5,200 nucleotides, about 2,400 nucleotides to about 5,000 nucleotides, about 2,400 nucleotides to about 4,800 nucleotides, about 2,400 nucleotides to about 4,600 nucleotides, about 2,400 nucleotides to about 4,400 nucleotides, about 2,400 nucleotides to about 4,200 nucleotides, about 2,400 nucleotides to about 4,000 nucleotides, about 2,400 nucleotides to about 3,800 nucleotides, about 2,400 nucleotides to about 3,600 nucleotides, about 2,400 nucleotides to about 3,400 nucleotides, about 2,400 nucleotides to about 3,200 nucleotides, about 2,400 nucleotides to about 3,000 nucleotides, about 2,400 nucleotides to about 2,800 nucleotides, about 2,400 nucleotides to about 2,600 nucleotides, about 2,600 nucleotides to about 10,000 nucleotides, about 2,600 nucleotides to about 9,500 nucleotides, about 2,600 nucleotides to about 9,000 nucleotides, about 2,600 nucleotides to about 8,500 nucleotides, about 2,600 nucleotides to about 8,000 nucleotides, about 2,600 nucleotides to about 7,800 nucleotides, about 2,600 nucleotides to about 7,600 nucleotides, about 2,600 nucleotides to about 7,400 nucleotides, about 2,600 nucleotides to about 7,200 nucleotides, about 2,600 nucleotides to about 7,000 nucleotides, about 2,600 nucleotides to about 6,800 nucleotides, about 2,600 nucleotides to about 6,600 nucleotides, about 2,600 nucleotides to about 6,400 nucleotides, about 2,600 nucleotides to about 6,200 nucleotides, about 2,600 nucleotides to about 6,000 nucleotides, about 2,600 nucleotides to about 5,800 nucleotides, about 2,600 nucleotides to about 5,600 nucleotides, about 2,600 nucleotides to about 5,400 nucleotides, about 2,600 nucleotides to about 5,200 nucleotides, about 2,600 nucleotides to about 5,000 nucleotides, about 2,600 nucleotides to about 4,800 nucleotides, about 2,600 nucleotides to about 4,600 nucleotides, about 2,600 nucleotides to about 4,400 nucleotides, about 2,600 nucleotides to about 4,200 nucleotides, about 2,600 nucleotides to about 4,000 nucleotides, about 2,600 nucleotides to about 3,800 nucleotides, about 2,600 nucleotides to about 3,600 nucleotides, about 2,600 nucleotides to about 3,400 nucleotides, about 2,600 nucleotides to about 3,200 nucleotides, about 2,600 nucleotides to about 3,000 nucleotides, about 2,600 nucleotides to about 2,800 nucleotides, about 2,800 nucleotides to about 10,000 nucleotides, about 2,800 nucleotides to about 9,500 nucleotides, about 2,800 nucleotides to about 9,000 nucleotides, about 2,800 nucleotides to about 8,500 nucleotides, about 2,800 nucleotides to about 8,000 nucleotides, about 2,800 nucleotides to about 7,800 nucleotides, about 2,800 nucleotides to about 7,600 nucleotides, about 2,800 nucleotides to about 7,400 nucleotides, about 2,800 nucleotides to about 7,200 nucleotides, about 2,800 nucleotides to about 7,000 nucleotides, about 2,800 nucleotides to about 6,800 nucleotides, about 2,800 nucleotides to about 6,600 nucleotides, about 2,800 nucleotides to about 6,400 nucleotides, about 2,800 nucleotides to about 6,200 nucleotides, about 2,800 nucleotides to about 6,000 nucleotides, about 2,800 nucleotides to about 5,800 nucleotides, about 2,800 nucleotides to about 5,600 nucleotides, about 2,800 nucleotides to about 5,400 nucleotides, about 2,800 nucleotides to about 5,200 nucleotides, about 2,800 nucleotides to about 5,000 nucleotides, about 2,800 nucleotides to about 4,800 nucleotides, about 2,800 nucleotides to about 4,600 nucleotides, about 2,800 nucleotides to about 4,400 nucleotides, about 2,800 nucleotides to about 4,200 nucleotides, about 2,800 nucleotides to about 4,000 nucleotides, about 2,800 nucleotides to about 3,800 nucleotides, about 2,800 nucleotides to about 3,600 nucleotides, about 2,800 nucleotides to about 3,400 nucleotides, about 2,800 nucleotides to about 3,200 nucleotides, about 2,800 nucleotides to about 3,000 nucleotides, about 3,000 nucleotides to about 10,000 nucleotides, about 3,000 nucleotides to about 9,500 nucleotides, about 3,000 nucleotides to about 9,000 nucleotides, about 3,000 nucleotides to about 8,500 nucleotides, about 3,000 nucleotides to about 8,000 nucleotides, about 3,000 nucleotides to about 7,800 nucleotides, about 3,000 nucleotides to about 7,600 nucleotides, about 3,000 nucleotides to about 7,400 nucleotides, about 3,000 nucleotides to about 7,200 nucleotides, about 3,000 nucleotides to about 7,000 nucleotides, about 3,000 nucleotides to about 6,800 nucleotides, about 3,000 nucleotides to about 6,600 nucleotides, about 3,000 nucleotides to about 6,400 nucleotides, about 3,000 nucleotides to about 6,200 nucleotides, about 3,000 nucleotides to about 6,000 nucleotides, about 3,000 nucleotides to about 5,800 nucleotides, about 3,000 nucleotides to about 5,600 nucleotides, about 3,000 nucleotides to about 5,400 nucleotides, about 3,000 nucleotides to about 5,200 nucleotides, about 3,000 nucleotides to about 5,000 nucleotides, about 3,000 nucleotides to about 4,800 nucleotides, about 3,000 nucleotides to about 4,600 nucleotides, about 3,000 nucleotides to about 4,400 nucleotides, about 3,000 nucleotides to about 4,200 nucleotides, about 3,000 nucleotides to about 4,000 nucleotides, about 3,000 nucleotides to about 3,800 nucleotides, about 3,000 nucleotides to about 3,600 nucleotides, about 3,000 nucleotides to about 3,400 nucleotides, about 3,000 nucleotides to about 3,200 nucleotides, about 3,200 nucleotides to about 10,000 nucleotides, about 3,200 nucleotides to about 9,500 nucleotides, about 3,200 nucleotides to about 9,000 nucleotides, about 3,200 nucleotides to about 8,500 nucleotides, about 3,200 nucleotides to about 8,000 nucleotides, about 3,200 nucleotides to about 7,800 nucleotides, about 3,200 nucleotides to about 7,600 nucleotides, about 3,200 nucleotides to about 7,400 nucleotides, about 3,200 nucleotides to about 7,200 nucleotides, about 3,200 nucleotides to about 7,000 nucleotides, about 3,200 nucleotides to about 6,800 nucleotides, about 3,200 nucleotides to about 6,600 nucleotides, about 3,200 nucleotides to about 6,400 nucleotides, about 3,200 nucleotides to about 6,200 nucleotides, about 3,200 nucleotides to about 6,000 nucleotides, about 3,200 nucleotides to about 5,800 nucleotides, about 3,200 nucleotides to about 5,600 nucleotides, about 3,200 nucleotides to about 5,400 nucleotides, about 3,200 nucleotides to about 5,200 nucleotides, about 3,200 nucleotides to about 5,000 nucleotides, about 3,200 nucleotides to about 4,800 nucleotides, about 3,200 nucleotides to about 4,600 nucleotides, about 3,200 nucleotides to about 4,400 nucleotides, about 3,200 nucleotides to about 4,200 nucleotides, about 3,200 nucleotides to about 4,000 nucleotides, about 3,200 nucleotides to about 3,800 nucleotides, about 3,200 nucleotides to about 3,600 nucleotides, about 3,200 nucleotides to about 3,400 nucleotides, about 3,400 nucleotides to about 10,000 nucleotides, about 3,400 nucleotides to about 9,500 nucleotides, about 3,400 nucleotides to about 9,000 nucleotides, about 3,400 nucleotides to about 8,500 nucleotides, about 3,400 nucleotides to about 8,000 nucleotides, about 3,400 nucleotides to about 7,800 nucleotides, about 3,400 nucleotides to about 7,600 nucleotides, about 3,400 nucleotides to about 7,400 nucleotides, about 3,400 nucleotides to about 7,200 nucleotides, about 3,400 nucleotides to about 7,000 nucleotides, about 3,400 nucleotides to about 6,800 nucleotides, about 3,400 nucleotides to about 6,600 nucleotides, about 3,400 nucleotides to about 6,400 nucleotides, about 3,400 nucleotides to about 6,200 nucleotides, about 3,400 nucleotides to about 6,000 nucleotides, about 3,400 nucleotides to about 5,800 nucleotides, about 3,400 nucleotides to about 5,600 nucleotides, about 3,400 nucleotides to about 5,400 nucleotides, about 3,400 nucleotides to about 5,200 nucleotides, about 3,400 nucleotides to about 5,000 nucleotides, about 3,400 nucleotides to about 4,800 nucleotides, about 3,400 nucleotides to about 4,600 nucleotides, about 3,400 nucleotides to about 4,400 nucleotides, about 3,400 nucleotides to about 4,200 nucleotides, about 3,400 nucleotides to about 4,000 nucleotides, about 3,400 nucleotides to about 3,800 nucleotides, about 3,400 nucleotides to about 3,600 nucleotides, about 3,600 nucleotides to about 10,000 nucleotides, about 3,600 nucleotides to about 9,500 nucleotides, about 3,600 nucleotides to about 9,000 nucleotides, about 3,600 nucleotides to about 8,500 nucleotides, about 3,600 nucleotides to about 8,000 nucleotides, about 3,600 nucleotides to about 7,800 nucleotides, about 3,600 nucleotides to about 7,600 nucleotides, about 3,600 nucleotides to about 7,400 nucleotides, about 3,600 nucleotides to about 7,200 nucleotides, about 3,600 nucleotides to about 7,000 nucleotides, about 3,600 nucleotides to about 6,800 nucleotides, about 3,600 nucleotides to about 6,600 nucleotides, about 3,600 nucleotides to about 6,400 nucleotides, about 3,600 nucleotides to about 6,200 nucleotides, about 3,600 nucleotides to about 6,000 nucleotides, about 3,600 nucleotides to about 5,800 nucleotides, about 3,600 nucleotides to about 5,600 nucleotides, about 3,600 nucleotides to about 5,400 nucleotides, about 3,600 nucleotides to about 5,200 nucleotides, about 3,600 nucleotides to about 5,000 nucleotides, about 3,600 nucleotides to about 4,800 nucleotides, about 3,600 nucleotides to about 4,600 nucleotides, about 3,600 nucleotides to about 4,400 nucleotides, about 3,600 nucleotides to about 4,200 nucleotides, about 3,600 nucleotides to about 4,000 nucleotides, about 3,600 nucleotides to about 3,800 nucleotides, about 3,800 nucleotides to about 10,000 nucleotides, about 3,800 nucleotides to about 9,500 nucleotides, about 3,800 nucleotides to about 9,000 nucleotides, about 3,800 nucleotides to about 8,500 nucleotides, about 3,800 nucleotides to about 8,000 nucleotides, about 3,800 nucleotides to about 7,800 nucleotides, about 3,800 nucleotides to about 7,600 nucleotides, about 3,800 nucleotides to about 7,400 nucleotides, about 3,800 nucleotides to about 7,200 nucleotides, about 3,800 nucleotides to about 7,000 nucleotides, about 3,800 nucleotides to about 6,800 nucleotides, about 3,800 nucleotides to about 6,600 nucleotides, about 3,800 nucleotides to about 6,400 nucleotides, about 3,800 nucleotides to about 6,200 nucleotides, about 3,800 nucleotides to about 6,000 nucleotides, about 3,800 nucleotides to about 5,800 nucleotides, about 3,800 nucleotides to about 5,600 nucleotides, about 3,800 nucleotides to about 5,400 nucleotides, about 3,800 nucleotides to about 5,200 nucleotides, about 3,800 nucleotides to about 5,000 nucleotides, about 3,800 nucleotides to about 4,800 nucleotides, about 3,800 nucleotides to about 4,600 nucleotides, about 3,800 nucleotides to about 4,200 nucleotides, about 3,800 nucleotides to about 4,000 nucleotides, about 4,000 nucleotides to about 10,000 nucleotides, about 4,000 nucleotides to about 9,500 nucleotides, about 4,000 nucleotides to about 9,000 nucleotides, about 4,000 nucleotides to about 8,500 nucleotides, about 4,000 nucleotides to about 8,000 nucleotides, about 4,000 nucleotides to about 7,800 nucleotides, about 4,000 nucleotides to about 7,600 nucleotides, about 4,000 nucleotides to about 7,400 nucleotides, about 4,000 nucleotides to about 7,200 nucleotides, about 4,000 nucleotides to about 7,000 nucleotides, about 4,000 nucleotides to about 6,800 nucleotides, about 4,000 nucleotides to about 6,600 nucleotides, about 4,000 nucleotides to about 6,400 nucleotides, about 4,000 nucleotides to about 6,200 nucleotides, about 4,000 nucleotides to about 6,000 nucleotides, about 4,000 nucleotides to about 5,800 nucleotides, about 4,000 nucleotides to about 5,600 nucleotides, about 4,000 nucleotides to about 5,400 nucleotides, about 4,000 nucleotides to about 5,200 nucleotides, about 4,000 nucleotides to about 5,000 nucleotides, about 4,000 nucleotides to about 4,800 nucleotides, about 4,000 nucleotides to about 4,600 nucleotides, about 4,000 nucleotides to about 4,400 nucleotides, about 4,000 nucleotides to about 4,200 nucleotides, about 4,200 nucleotides to about 10,000 nucleotides, about 4,200 nucleotides to about 9,500 nucleotides, about 4,200 nucleotides to about 9,000 nucleotides, about 4,200 nucleotides to about 8,500 nucleotides, about 4,200 nucleotides to about 8,000 nucleotides, about 4,200 nucleotides to about 7,800 nucleotides, about 4,200 nucleotides to about 7,600 nucleotides, about 4,200 nucleotides to about 7,400 nucleotides, about 4,200 nucleotides to about 7,200 nucleotides, about 4,200 nucleotides to about 7,000 nucleotides, about 4,200 nucleotides to about 6,800 nucleotides, about 4,200 nucleotides to about 6,600 nucleotides, about 4,200 nucleotides to about 6,400 nucleotides, about 4,200 nucleotides to about 6,200 nucleotides, about 4,200 nucleotides to about 6,000 nucleotides, about 4,200 nucleotides to about 5,800 nucleotides, about 4,200 nucleotides to about 5,600 nucleotides, about 4,200 nucleotides to about 5,400 nucleotides, about 4,200 nucleotides to about 5,200 nucleotides, about 4,200 nucleotides to about 5,000 nucleotides, about 4,200 nucleotides to about 4,800 nucleotides, about 4,200 nucleotides to about 4,600 nucleotides, about 4,200 nucleotides to about 4,400 nucleotides, about 4,400 nucleotides to about 10,000 nucleotides, about 4,400 nucleotides to about 9,500 nucleotides, about 4,400 nucleotides to about 9,000 nucleotides, about 4,400 nucleotides to about 8,500 nucleotides, about 4,400 nucleotides to about 8,000 nucleotides, about 4,400 nucleotides to about 7,800 nucleotides, about 4,400 nucleotides to about 7,600 nucleotides, about 4,400 nucleotides to about 7,400 nucleotides, about 4,400 nucleotides to about 7,200 nucleotides, about 4,400 nucleotides to about 7,000 nucleotides, about 4,400 nucleotides to about 6,800 nucleotides, about 4,400 nucleotides to about 6,600 nucleotides, about 4,400 nucleotides to about 6,400 nucleotides, about 4,400 nucleotides to about 6,200 nucleotides, about 4,400 nucleotides to about 6,000 nucleotides, about 4,400 nucleotides to about 5,800 nucleotides, about 4,400 nucleotides to about 5,600 nucleotides, about 4,400 nucleotides to about 5,400 nucleotides, about 4,400 nucleotides to about 5,200 nucleotides, about 4,400 nucleotides to about 5,000 nucleotides, about 4,400 nucleotides to about 4,800 nucleotides, about 4,400 nucleotides to about 4,600 nucleotides, about 4,600 nucleotides to about 10,000 nucleotides, about 4,600 nucleotides to about 9,500 nucleotides, about 4,600 nucleotides to about 9,000 nucleotides, about 4,600 nucleotides to about 8,500 nucleotides, about 4,600 nucleotides to about 8,000 nucleotides, about 4,600 nucleotides to about 7,800 nucleotides, about 4,600 nucleotides to about 7,600 nucleotides, about 4,600 nucleotides to about 7,400 nucleotides, about 4,600 nucleotides to about 7,200 nucleotides, about 4,600 nucleotides to about 7,000 nucleotides, about 4,600 nucleotides to about 6,800 nucleotides, about 4,600 nucleotides to about 6,600 nucleotides, about 4,600 nucleotides to about 6,400 nucleotides, about 4,600 nucleotides to about 6,200 nucleotides, about 4,600 nucleotides to about 6,000 nucleotides, about 4,600 nucleotides to about 5,800 nucleotides, about 4,600 nucleotides to about 5,600 nucleotides, about 4,600 nucleotides to about 5,400 nucleotides, about 4,600 nucleotides to about 5,200 nucleotides, about 4,600 nucleotides to about 5,000 nucleotides, about 4,600 nucleotides to about 4,800 nucleotides, about 4,800 nucleotides to about 10,000 nucleotides, about 4,800 nucleotides to about 9,500 nucleotides, about 4,800 nucleotides to about 9,000 nucleotides, about 4,800 nucleotides to about 8,500 nucleotides, about 4,800 nucleotides to about 8,000 nucleotides, about 4,800 nucleotides to about 7,800 nucleotides, about 4,800 nucleotides to about 7,600 nucleotides, about 4,800 nucleotides to about 7,400 nucleotides, about 4,800 nucleotides to about 7,200 nucleotides, about 4,800 nucleotides to about 7,000 nucleotides, about 4,800 nucleotides to about 6,800 nucleotides, about 4,800 nucleotides to about 6,600 nucleotides, about 4,800 nucleotides to about 6,400 nucleotides, about 4,800 nucleotides to about 6,200 nucleotides, about 4,800 nucleotides to about 6,000 nucleotides, about 4,800 nucleotides to about 5,800 nucleotides, about 4,800 nucleotides to about 5,600 nucleotides, about 4,800 nucleotides to about 5,400 nucleotides, about 4,800 nucleotides to about 5,200 nucleotides, about 4,800 nucleotides to about 5,000 nucleotides, about 5,000 nucleotides to about 10,000 nucleotides, about 5,000 nucleotides to about 9,500 nucleotides, about 5,000 nucleotides to about 9,000 nucleotides, about 5,000 nucleotides to about 8,500 nucleotides, about 5,000 nucleotides to about 8,000 nucleotides, about 5,000 nucleotides to about 7,800 nucleotides, about 5,000 nucleotides to about 7,600 nucleotides, about 5,000 nucleotides to about 7,400 nucleotides, about 5,000 nucleotides to about 7,200 nucleotides, about 5,000 nucleotides to about 7,000 nucleotides, about 5,000 nucleotides to about 6,800 nucleotides, about 5,000 nucleotides to about 6,600 nucleotides, about 5,000 nucleotides to about 6,400 nucleotides, about 5,000 nucleotides to about 6,200 nucleotides, about 5,000 nucleotides to about 6,000 nucleotides, about 5,000 nucleotides to about 5,800 nucleotides, about 5,000 nucleotides to about 5,600 nucleotides, about 5,000 nucleotides to about 5,400 nucleotides, about 5,000 nucleotides to about 5,200 nucleotides, about 5,200 nucleotides to about 10,000 nucleotides, about 5,200 nucleotides to about 9,500 nucleotides, about 5,200 nucleotides to about 9,000 nucleotides, about 5,200 nucleotides to about 8,500 nucleotides, about 5,200 nucleotides to about 8,000 nucleotides, about 5,200 nucleotides to about 7,800 nucleotides, about 5,200 nucleotides to about 7,600 nucleotides, about 5,200 nucleotides to about 7,400 nucleotides, about 5,200 nucleotides to about 7,200 nucleotides, about 5,200 nucleotides to about 7,000 nucleotides, about 5,200 nucleotides to about 6,800 nucleotides, about 5,200 nucleotides to about 6,600 nucleotides, about 5,200 nucleotides to about 6,400 nucleotides, about 5,200 nucleotides to about 6,200 nucleotides, about 5,200 nucleotides to about 6,000 nucleotides, about 5,200 nucleotides to about 5,800 nucleotides, about 5,200 nucleotides to about 5,600 nucleotides, about 5,200 nucleotides to about 5,400 nucleotides, about 5,400 nucleotides to about 10,000 nucleotides, about 5,400 nucleotides to about 9,500 nucleotides, about 5,400 nucleotides to about 9,000 nucleotides, about 5,400 nucleotides to about 8,500 nucleotides, about 5,400 nucleotides to about 8,000 nucleotides, about 5,400 nucleotides to about 7,800 nucleotides, about 5,400 nucleotides to about 7,600 nucleotides, about 5,400 nucleotides to about 7,400 nucleotides, about 5,400 nucleotides to about 7,200 nucleotides, about 5,400 nucleotides to about 7,000 nucleotides, about 5,400 nucleotides to about 6,800 nucleotides, about 5,400 nucleotides to about 6,600 nucleotides, about 5,400 nucleotides to about 6,400 nucleotides, about 5,400 nucleotides to about 6,200 nucleotides, about 5,400 nucleotides to about 6,000 nucleotides, about 5,400 nucleotides to about 5,800 nucleotides, about 5,400 nucleotides to about 5,600 nucleotides, about 5,600 nucleotides to about 10,000 nucleotides, about 5,600 nucleotides to about 9,500 nucleotides, about 5,600 nucleotides to about 9,000 nucleotides, about 5,600 nucleotides to about 8,500 nucleotides, about 5,600 nucleotides to about 8,000 nucleotides, about 5,600 nucleotides to about 7,800 nucleotides, about 5,600 nucleotides to about 7,600 nucleotides, about 5,600 nucleotides to about 7,400 nucleotides, about 5,600 nucleotides to about 7,200 nucleotides, about 5,600 nucleotides to about 7,000 nucleotides, about 5,600 nucleotides to about 6,800 nucleotides, about 5,600 nucleotides to about 6,600 nucleotides, about 5,600 nucleotides to about 6,400 nucleotides, about 5,600 nucleotides to about 6,200 nucleotides, about 5,600 nucleotides to about 6,000 nucleotides, about 5,600 nucleotides to about 5,800 nucleotides, about 5,800 nucleotides to about 10,000 nucleotides, about 5,800 nucleotides to about 9,500 nucleotides, about 5,800 nucleotides to about 9,000 nucleotides, about 5,800 nucleotides to about 8,500 nucleotides, about 5,800 nucleotides to about 8,000 nucleotides, about 5,800 nucleotides to about 7,800 nucleotides, about 5,800 nucleotides to about 7,600 nucleotides, about 5,800 nucleotides to about 7,400 nucleotides, about 5,800 nucleotides to about 7,200 nucleotides, about 5,800 nucleotides to about 7,000 nucleotides, about 5,800 nucleotides to about 6,800 nucleotides, about 5,800 nucleotides to about 6,600 nucleotides, about 5,800 nucleotides to about 6,400 nucleotides, about 5,800 nucleotides to about 6,200 nucleotides, about 5,800 nucleotides to about 6,000 nucleotides, about 6,000 nucleotides to about 10,000 nucleotides, about 6,000 nucleotides to about 9,500 nucleotides, about 6,000 nucleotides to about 9,000 nucleotides, about 6,000 nucleotides to about 8,500 nucleotides, about 6,000 nucleotides to about 8,000 nucleotides, about 6,000 nucleotides to about 7,800 nucleotides, about 6,000 nucleotides to about 7,600 nucleotides, about 6,000 nucleotides to about 7,400 nucleotides, about 6,000 nucleotides to about 7,200 nucleotides, about 6,000 nucleotides to about 7,000 nucleotides, about 6,000 nucleotides to about 6,800 nucleotides, about 6,000 nucleotides to about 6,600 nucleotides, about 6,000 nucleotides to about 6,400 nucleotides, about 6,000 nucleotides to about 6,200 nucleotides, about 6,200 nucleotides to about 10,000 nucleotides, about 6,200 nucleotides to about 9,000 nucleotides, about 6,200 nucleotides to about 8,500 nucleotides, about 6,200 nucleotides to about 8,000 nucleotides, about 6,200 nucleotides to about 7,800 nucleotides, about 6,200 nucleotides to about 7,600 nucleotides, about 6,200 nucleotides to about 7,400 nucleotides, about 6,200 nucleotides to about 7,200 nucleotides, about 6,200 nucleotides to about 7,000 nucleotides, about 6,200 nucleotides to about 6,800 nucleotides, about 6,200 nucleotides to about 6,600 nucleotides, about 6,200 nucleotides to about 6,400 nucleotides, about 6,400 nucleotides to about 10,000 nucleotides, about 6,400 nucleotides to about 9,500 nucleotides, about 6,400 nucleotides to about 9,000 nucleotides, about 6,400 nucleotides to about 8,500 nucleotides, about 6,400 nucleotides to about 8,000 nucleotides, about 6,400 nucleotides to about 7,800 nucleotides, about 6,400 nucleotides to about 7,600 nucleotides, about 6,400 nucleotides to about 7,400 nucleotides, about 6,400 nucleotides to about 7,200 nucleotides, about 6,400 nucleotides to about 7,000 nucleotides, about 6,400 nucleotides to about 6,800 nucleotides, about 6,400 nucleotides to about 6,600 nucleotides, about 6,600 nucleotides to about 10,000 nucleotides, about 6,600 nucleotides to about 9,500 nucleotides, about 6,600 nucleotides to about 9,000 nucleotides, about 6,600 nucleotides to about 8,500 nucleotides, about 6,600 nucleotides to about 8,000 nucleotides, about 6,600 nucleotides to about 7,800 nucleotides, about 6,600 nucleotides to about 7,600 nucleotides, about 6,600 nucleotides to about 7,400 nucleotides, about 6,600 nucleotides to about 7,200 nucleotides, about 6,600 nucleotides to about 7,000 nucleotides, about 6,600 nucleotides to about 6,800 nucleotides, about 6,800 nucleotides to about 10,000 nucleotides, about 6,800 nucleotides to about 9,500 nucleotides, about 6,800 nucleotides to about 9,000 nucleotides, about 6,800 nucleotides to about 8,500 nucleotides, about 6,800 nucleotides to about 8,000 nucleotides, about 6,800 nucleotides to about 7,800 nucleotides, about 6,800 nucleotides to about 7,600 nucleotides, about 6,800 nucleotides to about 7,400 nucleotides, about 6,800 nucleotides to about 7,200 nucleotides, about 6,800 nucleotides to about 7,000 nucleotides, about 7,000 nucleotides to about 10,000 nucleotides, about 7,000 nucleotides to about 9,500 nucleotides, about 7,000 nucleotides to about 9,000 nucleotides, about 7,000 nucleotides to about 8,500 nucleotides, about 7,000 nucleotides to about 8,000 nucleotides, about 7,000 nucleotides to about 7,800 nucleotides, about 7,000 nucleotides to about 7,600 nucleotides, about 7,000 nucleotides to about 7,400 nucleotides, about 7,000 nucleotides to about 7,200 nucleotides, about 7,200 nucleotides to about 10,000 nucleotides, about 7,200 nucleotides to about 9,500 nucleotides, about 7,200 nucleotides to about 9,000 nucleotides, about 7,200 nucleotides to about 8,500 nucleotides, about 7,200 nucleotides to about 8,000 nucleotides, about 7,200 nucleotides to about 7,800 nucleotides, about 7,200 nucleotides to about 7,600 nucleotides, about 7,200 nucleotides to about 7,400 nucleotides, about 7,400 nucleotides to about 10,000 nucleotides, about 7,400 nucleotides to about 9,500 nucleotides, about 7,400 nucleotides to about 9,000 nucleotides, about 7,400 nucleotides to about 8,500 nucleotides, about 7,400 nucleotides to about 8,000 nucleotides, about 7,400 nucleotides to about 7,800 nucleotides, about 7,400 nucleotides to about 7,600 nucleotides, about 7,600 nucleotides to about 10,000 nucleotides, about 7,600 nucleotides to about 9,500 nucleotides, about 7,600 nucleotides to about 9,000 nucleotides, about 7,600 nucleotides to about 8,500 nucleotides, about 7,600 nucleotides to about 8,000 nucleotides, about 7,600 nucleotides to about 7,800 nucleotides, about 7,800 nucleotides to about 10,000 nucleotides, about 7,800 nucleotides to about 9,500 nucleotides, about 7,800 nucleotides to about 9,000 nucleotides, about 7,800 nucleotides to about 8,500 nucleotides, about 7,800 nucleotides to about 8,000 nucleotides, about 8,000 nucleotides to about 10,000 nucleotides, about 8,000 nucleotides to about 9,500 nucleotides, about 8,000 nucleotides to about 9,000 nucleotides, about 8,000 nucleotides to about 8,500 nucleotides, about 8,500 nucleotides to about 10,000 nucleotides, about 8,500 nucleotides to about 9,500 nucleotides, about 8,500 nucleotides to about 9,000 nucleotides, about 9,000 nucleotides to about 10,000 nucleotides, about 9,000 nucleotides to about 9,500 nucleotides, or about 9,500 nucleotides to about 10,000 nucleotides (inclusive).

[0253] A variety of different methods known in the art can be used to introduce any of vectors disclosed herein into a primate cell (e.g., a supporting cochlear outer hair cell or a hair cell (e.g., an inner hair cell or an outer hair cell). Non-limiting examples of methods for introducing nucleic acid into a primate cell include: lipofection, transfection (e.g., calcium phosphate transfection, transfection using highly branched organic compounds, transfection using cationic polymers, dendrimer-based transfection, optical transfection, particle-based transfection (e.g., nanoparticle transfection), or transfection using liposomes (e.g., cationic liposomes)), microinjection, electroporation, cell squeezing, sonoporation, protoplast fusion, impalefection, hydrodynamic delivery, gene gun, magnetofection, viral transfection, and nucleofection.

[0254] Skilled practitioners will appreciate that any of the vectors described herein can be introduced into a primate cell by, for example, lipofection.

[0255] Various molecular biology techniques that can be used to introduce a mutation(s) and/or a deletion(s) into an endogenous gene are also known in the art. Non-limiting examples of such techniques include site-directed mutagenesis, CRISPR (e.g., CRISPR/Cas9-induced knock-in mutations and CRISPR/Cas9-induced knock-out mutations), TALENs, and base editing (Rees & Lui, Nature Rev. Genetics 19: 770-788, 2018; Eid et al., Biochem J. 475(11): 1955-1964, 2018). These methods can be used to correct the sequence of a defective endogenous gene present in a chromosome of a target cell.

[0256] Any of the vectors described herein can further include a control sequence, e.g., a control sequence selected from the group of a transcription initiation sequence, a transcription termination sequence, a promoter sequence, an enhancer sequence, an RNA splicing sequence, a polyadenylation (polyA) sequence, and a Kozak consensus sequence. Non-limiting examples of these control sequences are described herein. In some embodiments, a promoter can be a native promoter, a constitutive promoter, an inducible promoter, and/or a tissue-specific promoter.

[0257] Some embodiments of any of the compositions and kits described herein can include any combination of the AAV vectors described herein. Some embodiments of any of the methods described herein can include the use of any combination of the AAV vectors described herein.

### Promoters

[0258] The term “promoter” means a DNA sequence recognized by enzymes/proteins in a primate cell required to initiate the transcription of a specific gene (e.g., a supporting cell target gene or a hair cell target gene). A promoter typically refers to, e.g., a nucleotide sequence to which an RNA polymerase and/or any associated factor binds and at which transcription is initiated. Non-limiting examples of promoters are described herein. Additional examples of promoters are known in the art.

[0259] In some embodiments, a vector encoding an N-terminal portion of a hair cell target protein (e.g., a human hair cell target protein) or a hair cell target protein can include a promoter and/or an enhancer. The vector encoding the N-terminal portion of the hair cell target protein or a hair cell target protein can include any of the promoters and/or enhancers described herein or known in the art.

[0260] In some embodiments, a vector encoding an N-terminal portion of a supporting cell target protein (e.g., a human supporting cell target protein) or a supporting cell target protein can include a promoter and/or an enhancer. The vector encoding the N-terminal portion of the supporting cell target protein or a supporting cell target protein can include any of the promoters and/or enhancers described herein or known in the art.

[0261] In some embodiments, the promoter is an inducible promoter, a constitutive promoter, a primate cell promoter, a viral promoter, a chimeric promoter, an engineered promoter, a tissue-specific promoter, or any other type of promoter known in the art. In some embodiments, the promoter is a RNA polymerase II promoter, such as a primate RNA polymerase II promoter. In some embodiments, the promoter is a RNA polymerase III promoter, including, but not limited to, a H1 promoter, a human U6 promoter, a mouse U6 promoter, or a swine U6 promoter. The promoter will generally be one that is able to promote transcription in cochlear cells such as hair cells. In some examples, the promoter is a cochlea-specific promoter or a cochlea-oriented promoter.

[0262] A variety of promoters are known in the art that can be used herein. Non-limiting examples of promoters that can be used herein include: human EF1a, human cytomegalovirus (CMV) (U.S. Pat. No. 5,168,062), human ubiquitin C (UBC), mouse phosphoglycerate kinase 1, polyoma adenovirus, simian virus 40 (SV40), β-globin, β-actin, α-fetoprotein, γ-globin, β-interferon, γ-glutamyl transferase, mouse mammary tumor virus (MMTV), Rous sarcoma virus, rat insulin, glyceraldehyde-3-phosphate dehydrogenase, metallothionein II (MT II), amylase, cathepsin, MI muscarinic receptor, retroviral LTR (e.g. human T-cell leukemia virus HTLV), AAV ITR, interleukin-2, collagenase, platelet-derived growth factor, adenovirus 5 E2, stromelysin, murine MX gene, glucose regulated proteins (GRP78 and GRP94), α-2-macroglobulin, vimentin, MHC class I gene H-2κ b, HSP70, proliferin, tumor necrosis factor, thyroid stimulating hormone a gene, immunoglobulin light chain, T-cell receptor, HLA DQα and DQβ, interleukin-2 receptor, MHC class II, MHC class II HLA-DRα, muscle creatine kinase, prealbumin (transthyretin), elastase I, albumin gene, c-fos, c-HA-ras, neural cell adhesion molecule (NCAM), H2B (TH2B) histone, rat growth hormone, human serum amyloid (SAA), troponin I (TN I), duchenne muscular dystrophy, human immunodeficiency virus, and Gibbon Ape Leukemia Virus (GALV) promoters. Additional examples of promoters are known in the art. See, e.g., Lodish, Molecular Cell Biology, Freeman and Company, New York 2007. In some embodiments, the promoter is the CMV immediate early promoter. In some embodiments, the promoter is a CAG promoter or a CAG/CBA promoter.

[0263] The term “constitutive” promoter refers to a nucleotide sequence that, when operably linked with a nucleic acid encoding a target protein (e.g., a supporting cell target protein, a hair cell target protein), causes RNA to be transcribed from the nucleic acid in a primate cell under most or all physiological conditions.

[0264] Examples of constitutive promoters include, without limitation, the retroviral Rous sarcoma virus (RSV) LTR promoter, the cytomegalovirus (CMV) promoter (see, e.g., Boshart et al, Cell 41:521-530, 1985), the SV40 promoter, the dihydrofolate reductase promoter, the beta-actin promoter, the phosphoglycerol kinase (PGK) promoter, and the EF1-alpha promoter (Invitrogen).

[0265] Inducible promoters allow regulation of gene expression and can be regulated by exogenously supplied compounds, environmental factors such as temperature, or the presence of a specific physiological state, e.g., acute phase, a particular differentiation state of the cell, or in replicating cells only. Inducible promoters and inducible systems are available from a variety of commercial sources, including, without limitation, Invitrogen, Clontech, and Ariad. Additional examples of inducible promoters are known in the art.

[0266] Examples of inducible promoters regulated by exogenously supplied compounds include the zinc-inducible sheep metallothionine (MT) promoter, the dexamethasone (Dex)-inducible mouse mammary tumor virus (MMTV) promoter, the T7 polymerase promoter system (WO 98/10088); the ecdysone insect promoter (No et al, Proc. Natl. Acad. Sci. U.S.A. 93:3346-3351, 1996), the tetracycline-repressible system (Gossen et al, Proc. Natl. Acad. Sci. U.S.A. 89:5547-5551, 1992), the tetracycline-inducible system (Gossen et al, Science 268:1766-1769, 1995, see also Harvey et al, Curr. Opin. Chem. Biol. 2:512-518, 1998), the RU486-inducible system (Wang et al, Nat. Biotech. 15:239-243, 1997) and Wang et al, Gene Ther. 4:432-441, 1997), and the rapamycin-inducible system (Magari et al. J. Clin. Invest. 100:2865-2872, 1997).

[0267] The term “tissue-specific” promoter refers to a promoter that is active only in certain specific cell types and/or tissues (e.g., transcription of a specific gene occurs only within cells expressing transcription regulatory proteins that bind to the tissue-specific promoter).

[0268] In some embodiments, the regulatory sequences impart tissue-specific gene expression capabilities. In some cases, the tissue-specific regulatory sequences bind tissue-specific transcription factors that induce transcription in a tissue-specific manner.

[0269] Exemplary tissue-specific promoters include but are not limited to the following: a liver-specific thyroxin binding globulin (TBG) promoter, an insulin promoter, a glucagon promoter, a somatostatin promoter, a pancreatic polypeptide (PPY) promoter, a synapsin-1 (Syn) promoter, a creatine kinase (MCK) promoter, a primate desmin (DES) promoter, an alpha-myosin heavy chain (a-MHC) promoter, and a cardiac Troponin T (cTnT) promoter. Additional exemplary promoters include Beta-actin promoter, hepatitis B virus core promoter (Sandig et al., Gene Ther. 3:1002-1009, 1996), alpha-fetoprotein (AFP) promoter (Arbuthnot et al., Hum. Gene Ther. 7:1503-1514, 1996), bone osteocalcin promoter (Stein et al., Mol. Biol. Rep. 24:185-196, 1997); bone sialoprotein promoter (Chen et al., J. Bone Miner. Res. 11:654-664, 1996), CD2 promoter (Hansal et al., J. Immunol. 161:1063-1068, 1998); immunoglobulin heavy chain promoter; T cell receptor alpha-chain promoter, neuronal such as neuron-specific enolase (NSE) promoter (Andersen et al., Cell. Mol. Neurobiol. 13:503-515, 1993), neurofilament light-chain gene promoter (Piccioli et al., Proc. Natl. Acad. Sci. U.S.A. 88:5611-5615, 1991), and the neuron-specific vgf gene promoter (Piccioli et al., Neuron 15:373-384, 1995).

[0270] In some embodiments, the tissue-specific promoter is a cochlea-specific promoter. In some embodiments, the tissue-specific promoter is a cochlear hair cell-specific promoter. Non-limiting examples of cochlear hair cell-specific promoters include but are not limited to: a ATOH1 promoter, a POU4F3 promoter, a LHX3 promoter, a MYO7A promoter, a MYO6 promoter, a α9ACHR promoter, and a α10ACHR promoter. In some embodiments, the promoter is an outer hair cell-specific promoter such as a PRESTIN promoter or an ONCOMOD promoter. See, e.g., Zheng et al., Nature 405:149-155, 2000; Tian et al. Dev. Dyn. 231:199-203, 2004; and Ryan et al., Adv. Otorhinolaryngol. 66: 99-115, 2009.

[0271] In some embodiments of any of the AAV vectors described herein, the AAV vector includes a human ATOH1 enhancer-promoter (SEQ ID NO: 84).

Human ATOH1 enhancer-promoter
(SEQ ID NO: 84)
ctatggagtttgcataacaaacgtttggcagctcgctctottacactccattaacaagctgtaacatatag
ctgcaggttgctataatctcattaatattttggaaacttgaatattgagtatttctgagtgctcattcccc
atatgccagccacttctgccatgctgactggttcctttctctccattattagcaattagcttcttaccttc
caaagtcagatccaaggtatccaagatactagcaaaggaatcaactatgtgtgcaagttaagcatgcttaa
tatcacccaaacaaacaaagaggcagcatttcttaaagtaatgaagatagataaatcgggttagtcctttg
cgacactgctggtgctttctagagttttatatattttaagcagcttgctttatattctgtctttgcctccc
accccaccagcacttttatttgtggagggttttggctcgccacactttgggaaacttatttgatttcacgg
agagctgaaggaagatcatttttggcaacagacaagtttaaacacgatttctatgggacattgctaactgg
ggcccctaaggagaaaggggaaactgagcggagaatgggttaaatccttggaagcaggggagaggcagggg
aggagagaagtcggaggagtataaagaaaaggacaggaaccaagaagcgtgggggtggtttgccgtaatgt
gagtgtttcttaattagagaacggttgacaatagagggtctggcagaggctcctggccgcggtgcggagcg
tctggagcggagcacgcgctgtcagctggtgagcgcactctcctttcaggcagctccccggggagctgtgc
ggccacatttaacaccatcatcacccctccccggcctcctcaacctcggcctcctcctcgtcgacagcctt
ccttggcccccaccagcagagctcacagtagcgagcgtctctcgccgtctcccgcactcggccggggcctc
tctcctcccccagctgcgcagcgggagccgccactgcccactgcacctcccagcaaccagcccagcacgca
aagaagctgcgcaaagttaaagccaagcaatgccaaggggaggggaagctggaggcgggctttgagtggct
tctgggcgcctggcgggtccagaatcgcccagagccgcccgcggtcgtgcacatctgacccgagtcagctt
gggcaccagccgagagccggctccgcaccgctcccgcaccccagccgccggggtggtgacacacaccggag
tcgaattacagccctgcaattaacatatgaatctgacgaatttaaaagaaggaaaaaaaaaaaaaaacctg
agcaggcttgggagtcctctgcacacaagaacttttctcggggtgtaaaaactctttgattggctgctcgc
acgcgcctgcccgcgccctccattggctgagaagacacgcgaccggcgcgaggagggggttgggagaggag
cggggggagactgagtggcgcgtgccgctttttaaaggggcgcagcgccttcagcaaccggagaagcatag
ttgcacgcgacctggtgtgtgatctccgagtgggtgggggagggtcgaggagggaaaaaaaaataagacgt
tgcagaagagacccggaaagggccttttttttggttgagctggtgtcccagtgctgcctccgatcctgagc
ctccgagcctttgcagtgcaa

### Enhancers and 5′ Cap

[0272] In some instances, a vector can include a promoter sequence and/or an enhancer sequence. The term “enhancer” refers to a nucleotide sequence that can increase the level of transcription of a nucleic acid encoding a protein of interest (e.g., a supporting cell target protein or a hair cell target protein) Enhancer sequences (50-1500 basepairs in length) generally increase the level of transcription by providing additional binding sites for transcription-associated proteins (e.g., transcription factors). In some embodiments, an enhancer sequence is found within an intronic sequence. Unlike promoter sequences, enhancer sequences can act at much larger distance away from the transcription start site (e.g., as compared to a promoter). Non-limiting examples of enhancers include a RSV enhancer, a CMV enhancer, and a SV40 enhancer.

### Destabilizing Domain (DD)

[0273] Any of the AAV vectors provided herein can optionally include a sequence encoding a destabilizing domain (“a destabilizing sequence”) for temporal control of protein expression. Non-limiting examples of destabilizing sequences include sequences encoding: a FK506 sequence, a dihydrofolate reductase (DHFR) sequence.

Exemplary DHFR destabilizing sequence
(SEQ ID NO: 85):
MISLIAALAVDYVIGMENAMPWNLPADLAWFKRNTLNKPVIMGRHTWESIGRPLPGRKNIILSSQPSTDDR
VTWVKSVDEAIAACGDVPEIMVIGGGRVIEQFLPKAQKLYLTHIDAEVEGDTHFPDYEPDDWESVESEFHD
ADAQNSHSYCFEILERR
Exemplary DHFR destabilizing domain sequence
(SEQ ID NO: 86)
ggtaccatcagtotgattqcggcgttagoggtagattacgttatoggcatggaaaacgccatgccgtggaa
cctqcctqccgatctcgcctggtttaaacgcaacaccttaaataaacccgtgattatgggccgccatacct
gggaatcaatoggtcgtccgttgccaggacgcaaaaatattatcctcagcagtcaaccgagtacggacgat
cgcgtaacgtgggtgaagtoggtggatgaagccatcgcggcgtgtggtgacgtaccagaaatcatggtgat
tggcggcggtcgcgttattgaacagttottgccaaaagcgcaaaaactqtatctgacgcatatcgacgcag
aagtggaaggcgacacccatttccoggattacgagccggatgactgggaatcggtattcagcgaattccac
gatqctgatqcgcagaactotcacagctattgotttgagattctggagoggcgataa

[0274] In some embodiments of any of the AAV vectors described herein, the AAV vector includes a destabilizing domain (SEQ ID NO: 87).

Exemplary destabilizing domain
(SEQ ID NO: 87)
atcagtctgattgoggcgttagcggtagattacgttatcggcatggaaaacgccatgccgtggaacctgcc
tgccgatctcgcctggtttaaacgcaacaccttaaataaacccgtgattatgggccgccatacctgggaat
caatcggtcgtccgttgccaggacgcaaaaatattatcctcagcagtcaaccgagtacggacgatcgcgta
acgtgggtgaagtcggtggatgaagccatcgcggcgtgtggtgacgtaccagaaatcatggtgattggcgg
cggtcgcgttattgaacagttcttgccaaaagcgcaaaaactgtatctgacgcatatcgacgcagaagtgg
aaggcgacacccatttcccggattacgagccggatgactgggaatcggtattcagcgaattccacgatgct
gatgcgcagaactctcacagctattgctttgagattctggagcggcga

[0275] Additional examples of destabilizing sequences are known in the art. In some embodiments, the destabilizing sequence is a FK506- and rapamycin-binding protein (FKBP12) sequence, and the stabilizing ligand is Shield-1 (Shld1) (Banaszynski et al. (2012) Cell 126(5): 995-1004).

Exemplary FKBP12 destabilizing sequence
(SEQ ID NO: 88)
MGVEKQVIRPGNGPKPAPGQTVTVHCTGEGKDGDLSQKFWSTKDEGQKPFSFQIGKGAVIKGWDEGVIGMQ
IGEVARLRCSSDYAYGAGGFPAWGIQPNSVLDFEIEVLSVQ

[0276] In some embodiments, the destabilizing sequence is a DHFR sequence, and the stabilizing ligand is trimethoprim (TMP) (Iwamoto et al. (2010) Chem Biol 17:981-988).

[0277] In the absence of a stabilizing ligand, the protein sequence operatively linked to the destabilizing sequence is degraded by ubiquitination. In contrast, in the presence of a stabilizing ligand, protein degradation is inhibited, thereby allowing the protein sequence operatively linked to the destabilizing sequence to be actively expressed. As a positive control for stabilization of protein expression, protein expression can be detected by conventional means, including enzymatic, radiographic, colorimetric, fluorescence, or other spectrographic assays; fluorescent activating cell sorting (FACS) assays; immunological assays (e.g., enzyme linked immunosorbent assay (ELISA), radioimmunoassay (RIA), and immunohistochemistry).

[0278] In some embodiments, the destabilizing sequence is a FKBP12 sequence, and the presence of an AAV vector carrying the FKBP12 gene in a primate cell (e.g., a supporting cochlear outer hair cell) is detected by western blotting. In some embodiments, the destabilizing sequence can be used to verify the temporally-specific activity of any of the AAV vectors described herein.

### Poly(A) Sequences

[0279] In some embodiments, any of the vectors provided herein can include a poly(A) sequence. Most nascent eukaryotic mRNAs possess a poly(A) tail at their 3′ end which is added during a complex process that includes cleavage of the primary transcript and a coupled polyadenylation reaction (see, e.g., Proudfoot et al., Cell 108:501-512, 2002). The poly(A) tail confers mRNA stability and transferability (Molecular Biology of the Cell, Third Edition by B. Alberts et al., Garland Publishing, 1994). In some embodiments, the poly(A) sequence is positioned 3′ to the nucleic acid sequence encoding the C-terminus of the hair cell target protein. In some embodiments, the poly(A) sequence is positioned 3′ to the nucleic acid sequence encoding the C-terminus of the supporting cell target protein or a protein of interest (e.g., a Cas9 endonuclease, e.g., a SaCas9 endonuclease (e.g., any of the SaCas9 endonucleases described herein), a reporter protein (e.g., a GFP protein, a mScarlet protein)).

[0280] As used herein, “polyadenylation” refers to the covalent linkage of a polyadenylyl moiety, or its modified variant, to a messenger RNA molecule. In eukaryotic organisms, most messenger RNA (mRNA) molecules are polyadenylated at the 3′ end. The 3′ poly(A) tail is a long sequence of adenine nucleotides (e.g., 50, 60, 70, 100, 200, 500, 1000, 2000, 3000, 4000, or 5000) added to the pre-mRNA through the action of an enzyme, polyadenylate polymerase. In higher eukaryotes, the poly(A) tail is added onto transcripts that contain a specific sequence, the polyadenylation signal or “poly(A) sequence.” The poly(A) tail and the protein bound to it aid in protecting mRNA from degradation by exonucleases. Polyadenylation is also important for transcription termination, export of the mRNA from the nucleus, and translation. Polyadenylation occurs in the nucleus immediately after transcription of DNA into RNA, but additionally can also occur later in the cytoplasm. After transcription has been terminated, the mRNA chain is cleaved through the action of an endonuclease complex associated with RNA polymerase. The cleavage site is usually characterized by the presence of the base sequence AAUAAA near the cleavage site. After the mRNA has been cleaved, adenosine residues are added to the free 3′ end at the cleavage site.

[0281] As used herein, a “poly(A) sequence” is a sequence that triggers the endonuclease cleavage of an mRNA and the additional of a series of adenosines to the 3′ end of the cleaved mRNA.

[0282] There are several poly(A) sequences that can be used, including those derived from bovine growth hormone (bgh) (Woychik et al., Proc. Natl. Acad. Sci. U.S.A. 81(13):3944-3948, 1984; U.S. Pat. No. 5,122,458), mouse-β-globin, mouse-α-globin (Orkin et al., EMBO J. 4(2):453-456, 1985; Thein et al., Blood 71(2):313-319, 1988), human collagen, polyoma virus (Batt et al., Mol. Cell Biol. 15(9):4783-4790, 1995), the Herpes simplex virus thymidine kinase gene (HSV TK), IgG heavy-chain gene polyadenylation signal (US 2006/0040354), human growth hormone (hGH) (Szymanski et al., Mol. Therapy 15(7):1340-1347, 2007), the group of SV40 poly(A) sites, such as the SV40 late and early poly(A) site (Schek et al., Mol. Cell Biol. 12(12):5386-5393, 1992).

[0283] The poly(A) sequence can be a sequence of AATAAA. The AATAAA sequence may be substituted with other hexanucleotide sequences with homology to AATAAA which are capable of signaling polyadenylation, including ATTAAA, AGTAAA, CATAAA, TATAAA, GATAAA, ACTAAA, AATATA, AAGAAA, AATAAT, AAAAAA, AATGAA, AATCAA, AACAAA, AATCAA, AATAAC, AATAGA, AATTAA, or AATAAG (see, e.g., WO 06/12414).

[0284] In some embodiments, the poly(A) sequence can be a synthetic polyadenylation site (see, e.g., the pCl-neo expression vector of Promega which is based on Levitt el al, Genes Dev. 3(7):1019-1025, 1989). In some embodiments, the poly(A) sequence is the polyadenylation signal of soluble neuropilin-1 (sNRP) (AAATAAAATACGAAATG, SEQ ID NO: 90) (see, e.g., WO 05/073384). Additional examples of poly(A) sequences are known in the art.

### Internal Ribosome Entry Site (IRES)

[0285] In some embodiments, a vector encoding the C-terminus of the hair cell target protein or a hair cell target protein can include a polynucleotide internal ribosome entry site (IRES). In some embodiments, a vector encoding the C-terminus of the supporting cell target protein or a supporting cell target protein can include a polynucleotide internal ribosome entry site (IRES). An IRES sequence is used to produce more than one polypeptide from a single gene transcript. An IRES forms a complex secondary structure that allows translation initiation to occur from any position with an mRNA immediately downstream from where the IRES is located (see, e.g., Pelletier and Sonenberg, Mol. Cell. Biol. 8(3):1103-1112, 1988).

[0286] There are several IRES sequences known to those in skilled in the art, including those from, e.g., foot and mouth disease virus (FMDV), encephalomyocarditis virus (EMCV), human rhinovirus (HRV), cricket paralysis virus, human immunodeficiency virus (11W), hepatitis A virus (HAV), hepatitis C virus (HCV), and poliovirus (PV). See e.g., Alberts, Molecular Biology of the Cell, Garland Science, 2002; and Hellen et al., Genes Dev. 15(13):1593-612, 2001.

[0287] In some embodiments, the IRES sequence that is incorporated into the vector that encodes the C-terminus of a hair cell target protein or a hair cell target protein is the foot and mouth disease virus (FMDV). In some embodiments, the IRES sequence that is incorporated into the vector that encodes the C-terminus of a supporting cell target protein or a supporting cell target protein is the foot and mouth disease virus (FMDV) 2A sequence. In some embodiments, the IRES sequence that is incorporated into the vector that encodes the C-terminal portion of a protein of interest (e.g., a Cas9 endonuclease, e.g., a SaCas9 endonuclease (e.g., any of the SaCas9 endonucleases described herein)) is the FMDV 2A sequence. The Foot and Mouth Disease Virus 2A sequence is a small peptide (approximately 18 amino acids in length) that has been shown to mediate the cleavage of polyproteins (Ryan, M D et al., EMBO 4:928-933, 1994; Mattion et al., J. Virology 70:8124-8127, 1996; Furler et al., Gene Therapy 8:864-873, 2001; and Halpin et al., Plant Journal 4:453-459, 1999). The cleavage activity of the 2A sequence has previously been demonstrated in artificial systems including plasmids and gene therapy vectors (AAV and retroviruses) (Ryan et al., EMBO 4:928-933, 1994; Mattion et al., J. Virology 70:8124-8127, 1996; Furler et al., Gene Therapy 8:864-873, 2001; and Halpin et al., Plant Journal 4:453-459, 1999; de Felipe et al., Gene Therapy 6:198-208, 1999; de Felipe et al., Human Gene Therapy 11:1921-1931, 2000; and Klump et al., Gene Therapy 8:811-817, 2001).

### Reporter Sequences/Detectable Marker Genes

[0288] Any of the vectors provided herein can optionally include a sequence encoding a reporter protein or a detectable marker (“a reporter sequence” or “detectable marker gene”). Non-limiting examples of reporter sequences or detectable marker genes include DNA sequences encoding: a beta-lactamase, a beta-galactosidase (LacZ), an alkaline phosphatase, a thymidine kinase, a green fluorescent protein (GFP), a red fluorescent protein, an mCherry fluorescent protein, a yellow fluorescent protein, a chloramphenicol acetyltransferase (CAT), and a luciferase. Additional examples of reporter sequences and detectable marker genes are known in the art. When associated with regulatory elements which drive their expression, the reporter sequence or detectable marker gene can provide signals detectable by conventional means, including enzymatic, radiographic, colorimetric, fluorescence, or other spectrographic assays; fluorescent activating cell sorting (FACS) assays; immunological assays (e.g., enzyme linked immunosorbent assay (ELISA), radioimmunoassay (RIA), and immunohistochemistry).

[0289] In some embodiments, the reporter sequence or detectable marker gene is the LacZ gene, and the presence of a vector carrying the LacZ gene in a primate cell (e.g., a supporting cochlear outer hair cell or a hair cell (e.g., a cochlear outer hair cell or a cochlear inner hair cell)) is detected by assays for beta-galactosidase activity. In other embodiments, the reporter or detectable marker is a fluorescent protein (e.g., green fluorescent protein) or luciferase, the presence of a vector carrying the fluorescent protein or luciferase in a primate cell (e.g., a supporting cochlear outer hair cell or a hair cell (e.g., a cochlear outer hair cell, a cochlear inner hair cell)) may be measured by fluorescent techniques (e.g., fluorescent microscopy or FACS) or light production in a luminometer (e.g., a spectrophotometer or an IVIS imaging instrument). In some embodiments, the reporter sequence or detectable marker can be used to verify the tissue-specific targeting capabilities and tissue-specific promoter regulatory activity of any of the vectors described herein.

### Flanking Regions Untranslated Regions (UTRs)

[0290] In some embodiments, any of the vectors described herein (e.g., any of the at least two different vectors) can include an untranslated region. In some embodiments, a vector can includes a 5′ UTR or a 3′ UTR.

[0291] Untranslated regions (UTRs) of a gene are transcribed but not translated. The 5′ UTR starts at the transcription start site and continues to the start codon but does not include the start codon. The 3′ UTR starts immediately following the stop codon and continues until the transcriptional termination signal. There is growing body of evidence about the regulatory roles played by the UTRs in terms of stability of the nucleic acid molecule and translation. The regulatory features of a UTR can be incorporated into any of the vectors, compositions, kits, or methods as described herein to enhance the stability of a supporting cell target protein or a hair cell target protein or of a protein of interest (e.g., a Cas9 endonuclease, e.g., a SaCas9 endonuclease (e.g., any of the SaCas9 endonucleases described herein), a reporter protein (e.g., a GFP protein, a mScarlet protein).

[0292] Natural 5′ UTRs include a sequence that plays a role in translation initiation. They harbor signatures like Kozak sequences, which are commonly known to be involved in the process by which the ribosome initiates translation of many genes. Kozak sequences have the consensus sequence CCR(A/G)CCAUGG, where R is a purine (A or G) three bases upstream of the start codon (AUG), which is followed by another “G”. The 5′ UTR have also been known, e.g., to form secondary structures that are involved in elongation factor binding.

[0293] For example, in some embodiments, a 5′ UTR is included in any of the vectors described herein. Non-limiting examples of 5′ UTRs including those from the following genes: albumin, serum amyloid A, Apolipoprotein A/B/E, transferrin, alpha fetoprotein, erythropoietin, and Factor VIII, can be used to enhance expression of a nucleic acid molecule, such as a mRNA.

[0294] In some embodiments, a 5′ UTR from a mRNA that is transcribed by a cell in the cochlea can be included in any of the vectors, compositions, kits, and methods described herein.

[0295] 3′ UTRs are known to have stretches of adenosines and uridines embedded in them. These AU-rich signatures are particularly prevalent in genes with high rates of turnover. Based on their sequence features and functional properties, the AU-rich elements (AREs) can be separated into three classes (Chen et al., Mol. Cell. Biol. 15:5777-5788, 1995; Chen et al., Mol. Cell Biol. 15:2010-2018, 1995): Class I AREs contain several dispersed copies of an AUUUA motif within U-rich regions. For example, c-Myc and MyoD mRNAs contain class I AREs. Class II AREs possess two or more overlapping UUAUUUA(U/A) (U/A) nonamers. GM-CSF and TNF-alpha mRNAs are examples that contain class II AREs. Class III AREs are less well defined. These U-rich regions do not contain an AUUUA motif. Two well-studied examples of this class are c-Jun and myogenin mRNAs.

[0296] Most proteins binding to the AREs are known to destabilize the messenger, whereas members of the ELAV family, most notably HuR, have been documented to increase the stability of mRNA. HuR binds to AREs of all the three classes. Engineering the HuR specific binding sites into the 3′ UTR of nucleic acid molecules will lead to HuR binding and thus, stabilization of the message in vivo.

[0297] In some embodiments, the introduction, removal, or modification of 3′ UTR AREs can be used to modulate the stability of an mRNA encoding a hair cell target protein. In some embodiments, the introduction, removal, or modification of 3′ UTR

[0298] AREs can be used to modulate the stability of an mRNA encoding a supporting cell target protein. In other embodiments, AREs can be removed or mutated to increase the intracellular stability and thus increase translation and production of a hair cell target protein. In other embodiments, AREs can be removed or mutated to increase the intracellular stability and thus increase translation and production of a supporting cell target protein.

[0299] In other embodiments, non-UTR sequences may be incorporated into the 5′ or 3′ UTRs. In some embodiments, introns or portions of intron sequences may be incorporated into the flanking regions of the polynucleotides in any of the vectors, compositions, kits, and methods provided herein. Incorporation of intronic sequences may increase protein production as well as mRNA levels.

### Primate Cells

[0300] Also provided herein is a cell (e.g., a primate cell) that includes any of the nucleic acids, vectors (e.g., at least two different vectors described herein), or compositions described herein. In some embodiments, the primate cell is a human cell (e.g., a human supporting cell or a human hair cell). In other embodiments, the primate is a non-human primate (e.g., simian cell (e.g., a monkey cell (e.g., a marmoset cell, a baboon cell, a macaque cell), or an ape cell (e.g., a gorilla cell, a gibbon cell, an orangutan cell, a chimpanzee cell). Skilled practitioners will appreciate that the nucleic acids and vectors described herein can be introduced into any primate cell (e.g., a primate supporting cell or a primate hair cell). Non-limiting examples of vectors and methods for introducing vectors into primate cells are described herein.

[0301] In some embodiments, the primate cell can be a supporting hair cell of the inner ear of a mammal. For example, a supporting cell can be Hensen's cells, Deiters' cells, inner pillar cells, outer pillar cells, Claudius cells, inner border cells, inner phalangeal cells, or cells of the stria vascularis.

[0302] In some embodiments, the primate cell is a specialized cell of the cochlea. In some embodiments, the primate cell is a hair cell. In some embodiments, the primate cell is a cochlear inner hair cell or a cochlear outer hair cell. In some embodiments, the primate cell is a cochlear inner hair cell. In some embodiments, the primate cell is a cochlear outer hair cell.

[0303] In some embodiments, the primate cell is in vitro. In some embodiments, the primate cell is present in a primate. In some embodiments, the primate cell is autologous cell obtained from a primate and cultured ex vivo.

### Methods

[0304] Also provided herein are methods of correcting a hair cell target gene defect in a hair cell of an inner ear in a primate that include: administering to the inner ear of the primate a therapeutically effective amount of any of the compositions described herein, where the administering repairs the hair cell target gene defect in the hair cell of the inner ear of the primate.

[0305] Also provided herein are methods of increasing the expression level of a hair cell target protein in a hair cell of an inner ear of a primate that include: administering to the inner ear of the primate a therapeutically effective amount of any of the compositions described herein, where the administering results in an increase in the expression level of the hair cell target protein in the hair cell of the inner ear of the primate.

[0306] Also provided herein are methods of treating hearing loss (e.g., non-syndromic sensorineural hearing loss or syndromic sensorineural hearing loss) in a primate identified as having a defective hair cell target gene that include: administering to the inner ear of the primate a therapeutically effective amount of any of the compositions described herein.

[0307] In some embodiments of any of these methods, the primate has been previously identified as having a defective hair cell target gene (e.g., a hair cell target gene having a mutation that results in a decrease in the expression and/or activity of a hair cell target protein encoded by the gene). Some embodiments of any of these methods further include, prior to the introducing or administering step, determining that the primate has a defective hair cell target gene. Some embodiments of any of these methods can further include detecting a mutation in a hair cell target gene in a primate. Some embodiments of any of the methods can further include identifying or diagnosing a primate as having non-syndromic sensorineural hearing loss. Some embodiments of any of the methods can further include identifying or diagnosing a primate as having syndromic sensorineural hearing loss.

[0308] Also provided herein are methods of correcting a supporting cell target gene defect in a supporting cell of an inner ear in a primate that include: administering to the inner ear of the primate a therapeutically effective amount of any of the compositions described herein, where the administering repairs the supporting cell target gene defect in the supporting cell of the inner ear of the primate.

[0309] Also provided herein are methods of increasing the expression level of a supporting cell target protein in a supporting cell of an inner ear of a primate that include: administering to the inner ear of the primate a therapeutically effective amount of any of the compositions described herein, where the administering results in an increase in the expression level of the supporting cell target protein in the supporting cell of the inner ear of the primate.

[0310] Also provided herein are methods of treating hearing loss (e.g., non-syndromic sensorineural hearing loss or syndromic sensorineural hearing loss) in a primate identified as having a defective supporting cell target gene that include: administering to the inner ear of the primate a therapeutically effective amount of any of the compositions described herein.

[0311] Also provided herein are methods of restoring hearing in a primate identified or diagnosed as having hearing loss that include: administering to the inner ear of the primate a therapeutically effective amount of any compositions described herein.

[0312] Also provided herein are methods of restoring synapses and/or preserving spiral ganglion nerves in a primate identified or diagnosed as having an inner ear disorder that include: administering to the inner ear of the primate a therapeutically effective amount of any of the compositions described herein.

[0313] Also provided herein are methods that include administering to an inner ear of a primate a therapeutically effective amount of any of the compositions described herein.

[0314] In some embodiments of any of these methods, the primate has been previously identified as having a defective supporting cell target gene (e.g., a supporting cell target gene having a mutation that results in a decrease in the expression and/or activity of a supporting cell target protein encoded by the gene). Some embodiments of any of these methods further include, prior to the introducing or administering step, determining that the primate has a defective supporting cell target gene. Some embodiments of any of these methods can further include detecting a mutation in a supporting cell target gene in a primate. Some embodiments of any of the methods can further include identifying or diagnosing a primate as having non-syndromic sensorineural hearing loss. Some embodiments of any of the methods can further include identifying or diagnosing a primate as having syndromic sensorineural hearing loss.

[0315] In some embodiments of any of these methods, two or more doses of any of the compositions described herein are introduced or administered into the cochlea of the primate. Some embodiments of any of these methods can include introducing or administering a first dose of the composition into the cochlea of the primate, assessing hearing function of the primate following the introducing or the administering of the first dose, and administering an additional dose of the composition into the cochlea of the primate found not to have a hearing function within a normal range (e.g., as determined using any test for hearing known in the art).

[0316] In some embodiments of any of the methods described herein, the composition can be formulated for intra-cochlear administration. In some embodiments of any of the methods described herein, the compositions described herein can be administered via intra-cochlear administration or local administration. In some embodiments of any of the methods described herein, the compositions are administered through the use of a medical device (e.g., any of the exemplary medical devices described herein).

[0317] In some embodiments, intra-cochlear administration can be performed using any of the methods described herein or known in the art. For example, a composition can be administered or introduced into the cochlea using the following surgical technique: first using visualization with a 0 degree, 2.5-mm rigid endoscope, the external auditory canal is cleared and a round knife is used to sharply delineate an approximately 5-mm tympanomeatal flap. The tympanomeatal flap is then elevated and the middle ear is entered posteriorly. The chorda tympani nerve is identified and divided, and a currette is used to remove the scutal bone, exposing the round window membrane. To enhance apical distribution of the administered or introduced composition, a surgical laser may be used to make a small 2-mm fenestration in the oval window to allow for perilymph displacement during trans-round window membrane infusion of the composition. The microinfusion device is then primed and brought into the surgical field. The device is maneuvered to the round window, and the tip is seated within the bony round window overhang to allow for penetration of the membrane by the microneedle(s). The footpedal is engaged to allow for a measured, steady infusion of the composition. The device is then withdrawn and the round window and stapes foot plate are sealed with a gelfoam patch.

[0318] In some embodiments of any of the methods described herein, the primate has or is at risk of developing non-syndromic sensorineural hearing loss. In some embodiments of any of the methods described herein, the primate has been previously identified as having a mutation in a hair cell target gene. In some embodiments of any of the methods described herein, the primate has been previously identified as having a mutation in a supporting cell target gene. In some embodiments of any of the methods described herein, the primate has any of the mutations in a hair cell target gene that are described herein or are known in the art to be associated with non-syndromic sensorineural hearing loss or syndromic sensorineural hearing loss. In some embodiments of any of the methods described herein, the primate has any of the mutations in a supporting cell target gene that are described herein or are known in the art to be associated with non-syndromic sensorineural hearing loss or syndromic sensorineural hearing loss.

[0319] In some embodiments of any of the methods described herein, the primate has been identified as being a carrier of a mutation in a hair cell target gene (e.g., via genetic testing). In some embodiments of any of the methods described herein, the primate has been identified as being a carrier of a mutation in a supporting cell target gene (e.g., via genetic testing). In some embodiments of any of the methods described herein, the primate has been identified as having a mutation in a hair cell target gene and has been diagnosed with hearing loss (e.g., non-syndromic sensorineural hearing loss or syndromic sensorineural hearing loss). In some embodiments of any of the methods described herein, the primate has been identified as having a mutation in a supporting cell target gene and has been diagnosed with hearing loss (e.g., non-syndromic sensorineural hearing loss or syndromic sensorineural hearing loss). In some embodiments of any of the methods described herein, the primate has been identified as having hearing loss (e.g., non-syndromic sensorineural hearing loss or syndromic sensorineural hearing loss). In some embodiments, successful treatment of hearing loss (e.g., non-syndromic sensorineural hearing loss or syndromic sensorineural hearing loss) can be determined in a primate using any of the conventional functional hearing tests known in the art. Non-limiting examples of functional hearing tests are various types of audiometric assays (e.g., pure-tone testing, speech testing, test of the middle ear, auditory brainstem response, and otoacoustic emissions).

[0320] In some embodiments of these methods, the primate cell is in vitro. In some embodiments of these methods, the primate cell is originally obtained from a primate and is cultured ex vivo. In some embodiments, the primate cell has previously been determined to have a defective hair cell target gene. In some embodiments, the primate cell has previously been determined to have a defective supporting cell target gene.

[0321] Methods for introducing any of the compositions described herein into a primate cell are known in the art (e.g., via lipofection or through the use of a viral vector, e.g., any of the viral vectors described herein).

[0322] An increase in expression of an active target protein (e.g., an active supporting cell target protein (e.g., a full-length supporting cell target protein) or an active hair cell target protein (e.g., a full-length hair cell target protein) as described herein is, e.g., as compared to a control or to the level of expression of an active target protein (e.g., an active supporting cell target protein (e.g., a full-length supporting cell target protein) or an active hair cell target protein (e.g., a full-length hair cell target protein) prior to the introduction of the vector(s).

[0323] Methods of detecting expression and/or activity of a target protein (e.g., a supporting cell target protein or a hair cell target protein) are known in the art. In some embodiments, the level of expression of a hair cell target protein can be detected directly (e.g., detecting hair cell target protein or detecting hair cell target mRNA). In some embodiments, the level of expression of a supporting cell target protein can be detected directly (e.g., detecting supporting cell target protein or detecting supporting cell target mRNA). Non-limiting examples of techniques that can be used to detect expression and/or activity of a target protein (e.g., a supporting cell target protein or a hair cell target protein) directly include: real-time PCR, Western blotting, immunoprecipitation, immunohistochemistry, or immunofluorescence. In some embodiments, expression of a hair cell target protein can be detected indirectly (e.g., through functional hearing tests). In some embodiments, expression of a supporting cell target protein can be detected indirectly (e.g., through functional hearing tests).

### Pharmaceutical Compositions and Kits

[0324] In some embodiments, any of the compositions described herein can further include one or more agents that promote the entry of a nucleic acid or any of the vectors described herein into a primate cell (e.g., a liposome or cationic lipid).

[0325] In some embodiments, any of the vectors described herein can be formulated using natural and/or synthetic polymers. Non-limiting examples of polymers that may be included in any of the compositions described herein can include, but are not limited to, DYNAMIC POLYCONJUGATE® (Arrowhead Research Corp., Pasadena, Calif.), formulations from Mirus Bio (Madison, Wis.) and Roche Madison (Madison, Wis.), PhaseRX polymer formulations such as, without limitation, SMARTT POLYMER TECHNOLOGY® (PhaseRX, Seattle, Wash.), DMRUDOPE, poloxamer, VAXFECTIN® adjuvant from Vical (San Diego, Calif.), chitosan, cyclodextrin from Calando Pharmaceuticals (Pasadena, Calif.), dendrimers and poly (lactic-co-glycolic acid) (PLGA) polymers, RONDEL™ (RNAi/Oligonucleotide Nanoparticle Delivery) polymers (Arrowhead Research Corporation, Pasadena, Calif.), and pH responsive co-block polymers, such as, but not limited to, those produced by PhaseRX (Seattle, Wash.). Many of these polymers have demonstrated efficacy in delivering oligonucleotides in vivo into a primate cell (see, e.g., deFougerolles, Human Gene Ther. 19:125-132, 2008; Rozema et al., Proc. Natl. Acad. Sci. U.S.A. 104:12982-12887, 2007; Rozema et al., Proc. Natl. Acad. Sci. U.S.A. 104:12982-12887, 2007; Hu-Lieskovan et al., Cancer Res. 65:8984-8982, 2005; Heidel et al., Proc. Natl. Acad. Sci. U.S.A. 104:5715-5721, 2007).

[0326] Any of the compositions described herein can be, e.g., a pharmaceutical composition. A pharmaceutical composition can include any of the compositions described herein and one or more pharmaceutically or physiologically acceptable carriers, diluents, or excipients. Such compositions may include one or more buffers, such as neutral-buffered saline, phosphate-buffered saline, and the like; one or more carbohydrates, such as glucose, mannose, sucrose, and dextran; mannitol; one or more proteins, polypeptides, or amino acids, such as glycine; one or more antioxidants; one or more chelating agents, such as EDTA or glutathione; and/or one or more preservatives.

[0327] In some embodiments, the composition includes a pharmaceutically acceptable carrier (e.g., phosphate buffered saline, saline, or bacteriostatic water). Upon formulation, solutions will be administered in a manner compatible with the dosage formulation and in such amount as is therapeutically effective. The formulations are easily administered in a variety of dosage forms such as injectable solutions, injectable gels, drug-release capsules, and the like.

[0328] As used herein, the term “pharmaceutically acceptable carrier” includes solvents, dispersion media, coatings, antibacterial agents, antifungal agents, and the like that are compatible with pharmaceutical administration. Supplementary active compounds can also be incorporated into any of the compositions described herein.

[0329] In some embodiments, a single dose of any of the compositions described herein can include a total sum amount of the at least two different vectors of at least 1 ng, at least 2 ng, at least 4 ng, about 6 ng, about 8 ng, at least 10 ng, at least 20 ng, at least 30 ng, at least 40 ng, at least 50 ng, at least 60 ng, at least 70 ng, at least 80 ng, at least 90 ng, at least 100 ng, at least 200 ng, at least 300 ng, at least 400 ng, at least 500 ng, at least 1 μg, at least 2 μg, at least 4 μg, at least 6 μg, at least 8 μg, at least 10 μg, at least 12 μg, at least 14 μg, at least 16 μg, at least 18 μg, at least 20 μg, at least 22 μg, at least 24 μg, at least 26 μg, at least 28 μg, at least 30 μg at least 32 μg, at least 34 μg, at least 36 μg, at least 38 μg, at least 40 μg, at least 42 μg, at least 44 μg, at least 46 μg, at least 48 μg, at least 50 μg, at least 52 μg, at least 54 μg, at least 56 μg, at least 58 μg, at least 60 μg, at least 62 μg, at least 64 μg, at least 66 μg, at least 68 μg, at least 70 μg, at least 72 μg, at least 74 μg, at least 76 μg, at least 78 μg, at least 80 μg, at least 82 μg, at least 84 μg, at least 86 μg, at least 88 μg, at least 90 μg, at least 92 μg, at least 94 μg, at least 96 μg, at least 98 μg, at least 100 μg, at least 102 μg, at least 104 μg, at least 106 μg, at least 108 μg, at least 110 μg, at least 112 μg, at least 114 μg, at least 116 μg, at least 118 μg, at least 120 μg, at least 122 μg, at least 124 μg, at least 126 μg, at least 128 μg, at least 130 μg at least 132 μg, at least 134 μg, at least 136 μg, at least 138 μg, at least 140 μg, at least 142 μg, at least 144 μg, at least 146 μg, at least 148 μg, at least 150 μg, at least 152 μg, at least 154 μg, at least 156 μg, at least 158 μg, at least 160 μg, at least 162 μg, at least 164 μg, at least 166 μg, at least 168 μg, at least 170 μg, at least 172 μg, at least 174 μg, at least 176 μg, at least 178 μg, at least 180 μg, at least 182 μg, at least 184 μg, at least 186 μg, at least 188 μg, at least 190 μg, at least 192 μg, at least 194 μg, at least 196 μg, at least 198 μg, or at least 200 μg, e.g., in a buffered solution.

[0330] The compositions provided herein can be, e.g., formulated to be compatible with their intended route of administration. A non-limiting example of an intended route of administration is local administration (e.g., intra-cochlear administration). In some embodiments, the therapeutic compositions are formulated to include a lipid nanoparticle. In some embodiments, the therapeutic compositions are formulated to include a polymeric nanoparticle. In some embodiments, the therapeutic compositions are formulated to include a mini-circle DNA. In some embodiments, the therapeutic compositions are formulated to comprise a CELiD DNA. In some embodiments, the therapeutic compositions are formulated to comprise a synthetic perilymph solution. An exemplary synthetic perilymph solution includes 20-200 mM NaCl; 1-5 mM KCl; 0.1-10 mM CaCl₂; 1-10 mM glucose; 2-50 mM HEPES, having a pH of between about 6 and about 9.

[0331] Also provided are kits including any of the compositions described herein. In some embodiments, a kit can include a solid composition (e.g., a lyophilized composition including the at least two different vectors described herein) and a liquid for solubilizing the lyophilized composition. In some embodiments, a kit can include a pre-loaded syringe including any of the compositions described herein.

[0332] In some embodiments, the kit includes a vial comprising any of the compositions described herein (e.g., formulated as an aqueous composition, e.g., an aqueous pharmaceutical composition).

[0333] In some embodiments, the kits can include instructions for performing any of the methods described herein.

### Devices and Surgical Methods

[0334] Provided herein are therapeutic delivery systems for treating hearing loss (e.g., non-syndromic sensorineural hearing loss or syndromic sensorineural hearing loss). In one aspect, the therapeutic delivery systems include i) a medical device capable of creating one or a plurality of incisions in a round window membrane of an inner ear of a primate in need thereof, and ii) an effective dose of a composition (e.g., any of the compositions described herein). In some embodiments, the medical device includes a plurality of micro-needles.

[0335] Also provided herein are surgical methods for treatment of hearing loss (e.g., non-syndromic sensorineural hearing loss or syndromic sensorineural hearing loss). In some embodiments, the methods include the steps of: introducing into a cochlea of a primate a first incision at a first incision point; and administering intra-cochlearly a therapeutically effective amount of any of the compositions provided herein. In some embodiments, the composition is administered to the primate at the first incision point. In some embodiments, the composition is administered to the primate into or through the first incision.

[0336] In some embodiments of any of the methods described herein, any of the compositions described herein is administered to the primate into or through the cochlea oval window membrane. In some embodiments of any of the methods described herein, any of the compositions described herein is administered to the primate into or through the cochlea round window membrane. In some embodiments of any of the methods described herein, the composition is administered using a medical device capable of creating a plurality of incisions in the round window membrane. In some embodiments, the medical device includes a plurality of micro-needles. In some embodiments, the medical device includes a plurality of micro-needles including a generally circular first aspect, where each micro-needle has a diameter of at least about 10 microns. In some embodiments, the medical device includes a base and/or a reservoir capable of holding the composition. In some embodiments, the medical device includes a plurality of hollow micro-needles individually including a lumen capable of transferring the composition. In some embodiments, the medical device includes a means for generating at least a partial vacuum.

[0337] The invention is further described in detail by reference to the following experimental examples. These examples are provided for purposes of illustration only, and are not intended to be limiting unless otherwise specified. Thus, the invention should in no way be construed as being limited to the following examples, but rather should be construed to encompass any and all variations that become evident as a result of the teaching provided herein.

[0338] Without further description, it is believed that one of ordinary skill in the art can, using the preceding description and the following illustrative examples, make and utilize the compounds of the present invention and practice the claimed methods. The following working examples specifically point out various aspects of the present invention, and are not to be construed as limiting in any way the remainder of the disclosure.

### EXAMPLES

### Example 1. AAV Single Vector Injection into the Inner Ear

[0339] Immunofluorescent staining was performed on cochlear tissue of a cynomolgus macaque (non-human primate) following administration of a single Anc80-GFP AAV vector directly into the inner ear through the round window.

[0340] The cochlear tissue from the treated macaque was processed for immunofluorescence analysis using Myo7a as a marker for hair cells and Iba-1 as a marker for macrophages. The middle turn is representative of the entire sensory epithelium. The data in FIGS. 1A-1C show clear GFP expression in both the hair cells and the supporting cells, including the following supporting cell subtypes: Hensen's cells (HC), Claudius cells (CC), Dieter cells (DC), inner and outer pillar cells (OPC/IPC), inner border cells, and inner phalangeal cells (IPHC/IBC). These data demonstrate successful Anc80-GFP AAV vector transduction into different cell types of the inner ear sensory epithelium, and the resulting expression of the encoded reporter gene (GFP) in these different cell types. These data indicate the present claimed compositions including a single AAV vector or two or more AAV vectors can be used to express a gene in hair cells and supporting cells, and can be used to repair a mutation in a gene in hair cells and supporting cells.

### OTHER EMBODIMENTS

[0341] It is to be understood that while the invention has been described in conjunction with the detailed description thereof, the foregoing description is intended to illustrate and not limit the scope of the invention, which is defined by the scope of the appended claims. Other aspects, advantages, and modifications are within the scope of the following claims.

[0342] All publications, patent applications, patents, and other references mentioned herein are incorporated by reference in their entirety. In case of conflict, the present specification, including definitions, will control. In addition, section headings, the materials, methods, and examples are illustrative only and not intended to be limiting.

The application's sequence listing, which the Patent Office published only in electronic form, follows.

SEQUENCE LISTING (114 sequences)

SEQ ID NO: 1 - protein, 226 aa, Homo sapiens
MDWGTLQTILGGVNKHSTSIGKIWLTVLFIFRIMILVVAAKEVWGDEQADFVCNTLQPGCKNVCYDHYFPISHIRLWALQLIFVSTPALLVAMHVAYRRHEKKRKFIKGEIKSEFKDIEEIKTQKVRIEGSLWWTYTSSIFFRVIFEAAFMYVFYVMYDGFSMQRLVKCNAWPCPNTVDCFVSRPTEKTVFTVFMIAVSGICILLNVTELCYLLIRYCSGKSKKPV

SEQ ID NO: 2 - DNA, 681 bp, Homo sapiens
atggattggggcacgctgcagacgatcctggggggtgtgaacaaacactccaccagcattggaaagatctggctcaccgtcctcttcatttttcgcattatgatcctcgttgtggctgcaaaggaggtgtggggagatgagcaggccgactttgtctgcaacaccctgcagccaggctgcaagaacgtgtgctacgatcactacttccccatctcccacatccggctatgggccctgcagctgatcttcgtgtccacgccagcgctcctagtggccatgcacgtggcctaccggagacatgagaagaagaggaagttcatcaagggggagataaagagtgaatttaaggacatcgaggagatcaaaacccagaaggtccgcatcgaaggctccctgtggtggacctacacaagcagcatcttcttccgggtcatcttcgaagccgccttcatgtacgtcttctatgtcatgtacgacggcttctccatgcagcggctggtgaagtgcaacgcctggccttgtcccaacactgtggactgctttgtgtcccggcccacggagaagactgtcttcacagtgttcatgattgcagtgtctggaatttgcatcctgctgaatgtcactgaattgtgttatttgctaattagatattgttctgggaagtcaaaaaagccagtttaa

SEQ ID NO: 3 - DNA, 5513 bp, Homo sapiens
ggggtgcggttaaaaggcgccacggcgggagacaggtgttgcggccccgcagcgcccgcgcgctcctctccccgactcggagcccctcggcggcgcccggcccaggacccgcctaggagcgcaggagccccagcgcagagaccccaacgccgagacccccgccccggccccgccgcgcttcctcccgacgcaggtgagcccgccggccccggactgcccggccaggaacctggcgcggggagggaccgcgagacccagagcggttgcccggccgcgtgggtctcggggaaccggggggctggaccaacacacgtccttgggccggggggcgggggccgccttctggagcgggcgtttctgcggccgagctccggagctggaatggggcggccggggaagtggacgcgatggcaccgcccggggtgcgagtggggccgggcgcgcgcgggaggggaaaaaggcgcgggcgagccgccagcgcgaggtttgtggtgtcgccgatgtcccttcggggtactctagcgcagccgcctggctacttgacccactgccaccaaacgttttaaattcaccgaaagcttagcttcgaagcaaagctccgtttcgccggtgaagcaggaagccttcgctgcaggaactgacctttacctcttggagcggcttctgcagaaaaatccccgggcagagatttgggcggagtttgcctagaactaacgcggagccagccgatcccggcctaccccggggccaagatttcagtggcttccctttttcctaaacacttcacgagggtctgtttccgggctgtgctccccgcctagaaggaaaatttttaggacccttgttcgcgaagaggtggtgtgcggctgagacccgcgtcctcaggacggttccatcagtgcctcgatcctgccccactggaggaggaaggcagcccgaacagcgctcacctaactaacagctgctgagagctgggttccgtggccatgcacctgggactgccttgagaagcgtggtacggccgtgtccccatgtgaccttagagtccctttcgaaactgctgtgcacagtcggtcacaatttcagacactggtgagaagggtggaggaaccctctggggacagccaggcaaggtcgaccacccatcacctaagggtggagaaatttaaggggtgaagagtcccttttgccttttctggatcctggtgattcacctagtgtcttccctaaggaactgaaccaactcctccgctggcctctggcagccctccaggcggtgcaggatggcgtgggcccggtaggaagctgcatgtaaccgcccagggtcgggaggccaggagggcagctcctcctctgacttgaatattgaaaacaacttcgtcctgcttctgagcccctcttaacccatgaccccctagcccattggggagtaaatcttaatttactcctcttcctgaaaaaggatctttaaaacaggtagcttcaactcaagctttataaaataacaatatagggtttctcggaactgtatttttctcagctgatggtaactggacaggtctgtagaagggtgtatgacctgggtttggcaggtggaagagggcaaaggataaacccctcctcctgcagccccatattcttggccaggtgtattgttgtaaaccaggagagagtttacttcggggagtatcctgttttccactcagtgagggccaatgaagaatgtctaattccataagatgcttttgttaaaatcggaatgttgctgtcctcggtggttctgctgttgggacgggactggcctgagctgtgggtgctgtagcaggacaaccagctcacctaagggcctcccagtctggattatcaatgggtcagtgctgaacctgggctaaaatattgttttttccaatgatgttgtctttcccaagctcagtgaagctaaatgtttcacaggcctatgtcaatctgatgtaactttcgtggccacctctctcctgttagcctctgaccaaggtggcactggatggtttctgcctgaccttggtgccccgtggcagcgactgtgggtcatgaaagacattcactacgagcctgcttctggagtccatcagaaaacgggatgcaacttgcctaaaatgaggagaggaggatgcttttaagaaaaagaagaaggaggattcactaccagctctgaagggtggaaaagagatgattcatccggattgtggagagggtggaatcttgtttaggagagcgttggttgtggcaggcagggtgtaactatgaatcagtgaagacaattcacatcctgggatgaaaagaaggccatgggctcacaggagattatccactggcctctccacatccgcttgcagtaaggagtgtgggactctcccaagcttcagcgctgaactgcaatgcagtgacgtcgcttagctgggccagtaaccgagggagttgaattttctgtcattttaaaataatgtgtcttttaagaaacactttgaaattaaaaccacagcccacaattataatgcactgttgcagcacttatcaaaacagatatgctaactgagccatcagtgccagcctgacagtgaggccaccaagccatccacaaagcctacacgaaagtctgtgctcacagtggcttttctccatgaagagggcattcctaacctcttcctttcacgtaggaggaagcaaggtcctttgtaaaattttaactcggggtgcctcaaatgtaaacttaaccactggtaacaacagtttcactgctacatgccacgtctgtgaaaattcattcaagacattaaggaaagtggctcagcagagagactagacatcttatcctcacggttctcctgtacttggcctctcagcctttgagcaaggttggcccaagctagtatcggccccagtggtacagccaaaacttgagactgcaaatggatgcagctgttgaacgctgagtaacttctgcagagtcaggaagacccaaggaagctctgcagaggatgcaggggtacggtcagaacccctgagtgcctttcagctaacgaggactttatgacactccccagcacagcaaatttttatgatgtgtttaaagattgggtgaattactcaggtgaacaagctactttttatcagagaacacctaaaaacacgttcaagagggtttgggaactatacatttaatcctatgacaaactaagttggttctgtcttcacctgttttggtgaggttgtgtaagagttggtgtttgctcaggaagagatttaagcatgcttgcttacccagactcagagaagtctccctgttctgtcctagctagtgattcctgtgttgtgtgcattcgtcttttccagagcaaaccgcccagagtagaagatggattggggcacgctgcagacgatcctggggggtgtgaacaaacactccaccagcattggaaagatctggctcaccgtcctcttcatttttcgcattatgatcctcgttgtggctgcaaaggaggtgtggggagatgagcaggccgactttgtctgcaacaccctgcagccaggctgcaagaacgtgtgctacgatcactacttccccatctcccacatccggctatgggccctgcagctgatcttcgtgtccacgccagcgctcctagtggccatgcacgtggcctaccggagacatgagaagaagaggaagttcatcaagggggagataaagagtgaatttaaggacatcgaggagatcaaaacccagaaggtccgcatcgaaggctccctgtggtggacctacacaagcagcatcttcttccgggtcatcttcgaagccgccttcatgtacgtcttctatgtcatgtacgacggcttctccatgcagcggctggtgaagtgcaacgcctggccttgtcccaacactgtggactgctttgtgtcccggcccacggagaagactgtcttcacagtgttcatgattgcagtgtctggaatttgcatcctgctgaatgtcactgaattgtgttatttgctaattagatattgttctgggaagtcaaaaaagccagtttaacgcattgcccagttgttagattaagaaatagacagcatgagagggatgaggcaacccgtgctcagctgtcaaggctcagtcgctagcatttcccaacacaaagattctgaccttaaatgcaaccatttgaaacccctgtaggcctcaggtgaaactccagatgccacaatggagctctgctcccctaaagcctcaaaacaaaggcctaattctatgcctgtcttaattttctttcacttaagttagttccactgagaccccaggctgttaggggttattggtgtaaggtactttcatattttaaacagaggatatcggcatttgtttctttctctgaggacaagagaaaaaagccaggttccacagaggacacagagaaggtttgggtgtcctcctggggttctttttgccaactttccccacgttaaaggtgaacattggttctttcatttgctttggaagttttaatctctaacagtggacaaagttaccagtgccttaaactctgttacactttttggaagtgaaaactttgtagtatgataggttattttgatgtaaagatgttctggataccattatatgttccccctgtttcagaggctcagattgtaatatgtaaatggtatgtcattcgctactatgatttaatttgaaatatggtcttttggttatgaatactttgcagcacagctgagaggctgtctgttgtattcattgtggtcatagcacctaacaacattgtagcctcaatcgagtgagacagactagaagttcctagtgatggcttatgatagcaaatggcctcatgtcaaatatttagatgtaattttgtgtaagaaatacagactggatgtaccaccaactactacctgtaatgacaggcctgtccaacacatctcccttttccatgactgtggtagccagcatcggaaagaacgctgatttaaagaggtcgcttgggaattttattgacacagtaccatttaatggggaggacaaaatggggcaggggagggagaagtttctgtcgttaaaaacagatttggaaagactggactctaaagtctgttgattaaagatgagctttgtctacttcaaaagtttgtttgcttaccccttcagcctccaattttttaagtgaaaatatagctaataacatgtgaaaagaatagaagctaaggtttagataaatattgagcagatctataggaagattgaacctgaatattgccattatgcttgacatggtttccaaaaaatggtactccacatatttcagtgagggtaagtattttcctgttgtcaagaatagcattgtaaaagcattttgtaataataaagaatagctttaatgatatgcttgtaactaaaataattttgtaatgtatcaaatacatttaaaacattaaaatataatctctataataatttaaaa

SEQ ID NO: 4 - protein, 780 aa, Homo sapiens
MAAPGGRSEPPQLPEYSCSYMVSRPVYSELAFQQQHERRLQERKTLRESLAKCCSCSRKRAFGVLKTLVPILEWLPKYRVKEWLLSDVISGVSTGLVATLQGMAYALLAAVPVGYGLYSAFFPILTYFIFGTSRHISVGPFPVVSLMVGSVVLSMAPDEHFLVSSSNGTVLNTTMIDTAARDTARVLIASALTLLVGIIQLIFGGLQIGFIVRYLADPLVGGFTTAAAFQVLVSQLKIVLNVSTKNYNGVLSIIYTLVEIFQNIGDTNLADFTAGLLTIVVCMAVKELNDRFRHKIPVPIPIEVIVTIIATAISYGANLEKNYNAGIVKSIPRGFLPPELPPVSLFSEMLAASFSIAVVAYAIAVSVGKVYATKYDYTIDGNQEFIAFGISNIFSGFFSCFVATTALSRTAVQESTGGKTQVAGIISAAIVMIAILALGKLLEPLQKSVLAAVVIANLKGMFMQLCDIPRLWRQNKIDAVIWVFTCIVSIILGLDLGLLAGLIFGLLTVVLRVQFPSWNGLGSIPSTDIYKSTKNYKNIEEPQGVKILRFSSPIFYGNVDGFKKCIKSTVGFDAIRVYNKRLKALRKIQKLIKSGQLRATKNGIISDAVSTNNAFEPDEDIEDLEELDIPTKEIEIQVDWNSELPVKVNVPKVPIHSLVLDCGAISFLDVVGVRSLRVIVKEFQRIDVNVYFASLQDYVIEKLEQCGFFDDNIRKDTFFLTVHDAILYLQNQVKSQEGQGSILETITLIQDCKDTLELIETELTEEELDVQDEAMRTLAS

SEQ ID NO: 5 - DNA, 2343 bp, Homo sapiens
atggcagcgccaggcggcaggtcggagccgccgcagctccccgagtacagctgcagctacatggtgtcgcggccggtctacagcgagctcgctttccagcaacagcacgagcggcgcctgcaggagcgcaagacgctgcgggagagcctggccaagtgctgcagttgttcaagaaagagagcctttggtgtgctaaagactcttgtgcccatcttggagtggctccccaaataccgagtcaaggaatggctgcttagtgacgtcatttcgggagttagtactgggctagtggccacgctgcaagggatggcatatgccctactagctgcagttcctgtcggatatggtctctactctgcttttttccctatcctgacatactttatctttggaacatcaagacatatctcagttggaccttttccagtggtgagtttaatggtgggatctgttgttctgagcatggcccccgacgaacactttctcgtatccagcagcaatggaactgtattaaatactactatgatagacactgcagctagagatacagctagagtcctgattgccagtgccctgactctgctggttggaattatacagttgatatttggtggcttgcagattggattcatagtgaggtacttggcagatcctttggttggtggcttcacaacagctgctgccttccaagtgctggtctcacagctaaagattgtcctcaatgtttcaaccaaaaactacaatggagttctctctattatctatacgctggttgagatttttcaaaatattggtgataccaatcttgctgatttcactgctggattgctcaccattgtcgtctgtatggcagttaaggaattaaatgatcggtttagacacaaaatcccagtccctattcctatagaagtaattgtgacgataattgctactgccatttcatatggagccaacctggaaaaaaattacaatgctggcattgttaaatccatcccaagggggtttttgcctcctgaacttccacctgtgagcttgttctcggagatgctggctgcatcattttccatcgctgtggtggcttatgctattgcagtgtcagtaggaaaagtatatgccaccaagtatgattacaccatcgatgggaaccaggaattcattgcctttgggatcagcaacatcttctcaggattcttctcttgttttgtggccaccactgctctttcccgcacggccgtccaggagagcactggaggaaagacacaggttgctggcatcatctctgctgcgattgtgatgatcgccattcttgccctggggaagcttctggaacccttgcagaagtcggtcttggcagctgttgtaattgccaacctgaaagggatgtttatgcagctgtgtgacattcctcgtctgtggagacagaataagattgatgctgttatctgggtgtttacgtgtatagtgtccatcattctggggctggatctcggtttactagctggccttatatttggactgttgactgtggtcctgagagttcagtttccttcttggaatggccttggaagcatccctagcacagatatctacaaaagtaccaagaattacaaaaacattgaagaacctcaaggagtgaagattcttagattttccagtcctattttctatggcaatgtcgatggttttaaaaaatgtatcaagtccacagttggatttgatgccattagagtatataataagaggctgaaagcgctgaggaaaatacagaaactaataaaaagtggacaattaagagcaacaaagaatggcatcataagtgatgctgtttcaacaaataatgcttttgagcctgatgaggatattgaagatctggaggaacttgatatcccaaccaaggaaatagagattcaagtggattggaactctgagcttccagtcaaagtgaacgttcccaaagtgccaatccatagccttgtgcttgactgtggagctatatctttcctggacgttgttggagtgagatcactgcgggtgattgtcaaagaattccaaagaattgatgtgaatgtgtattttgcatcacttcaagattatgtgatagaaaagctggagcaatgcgggttctttgacgacaacattagaaaggacacattctttttgacggtccatgatgctatactctatctacagaaccaagtgaaatctcaagagggtcaaggttccattttagaaacgatcactctcattcaggattgtaaagatacccttgaattaatagaaacagagctgacggaagaagaacttgatgtccaggatgaggctatgcgtacacttgcatcctga

SEQ ID NO: 6 - DNA, 4928 bp, Homo sapiens
ctcagccttcccggttcgggaaaggggaagaatgcaggaggggtaggatttctttcctgataggatcggttgggaaagaccgcagcctgtgtgtgtctttcccttcgaccaaggtgtctgttgctccgtaaataaaacgtcccactgccttctgagagcgctataaaggcagcggaagggtagtccgcggggcattccgggcggggcgcgagcagagacaggtcatggcagcgccaggcggcaggtcggagccgccgcagctccccgagtacagctgcagctacatggtgtcgcggccggtctacagcgagctcgctttccagcaacagcacgagcggcgcctgcaggagcgcaagacgctgcgggagagcctggccaagtgctgcagttgttcaagaaagagagcctttggtgtgctaaagactcttgtgcccatcttggagtggctccccaaataccgagtcaaggaatggctgcttagtgacgtcatttcgggagttagtactgggctagtggccacgctgcaagggatggcatatgccctactagctgcagttcctgtcggatatggtctctactctgcttttttccctatcctgacatactttatctttggaacatcaagacatatctcagttggaccttttccagtggtgagtttaatggtgggatctgttgttctgagcatggcccccgacgaacactttctcgtatccagcagcaatggaactgtattaaatactactatgatagacactgcagctagagatacagctagagtcctgattgccagtgccctgactctgctggttggaattatacagttgatatttggtggcttgcagattggattcatagtgaggtacttggcagatcctttggttggtggcttcacaacagctgctgccttccaagtgctggtctcacagctaaagattgtcctcaatgtttcaaccaaaaactacaatggagttctctctattatctatacgctggttgagatttttcaaaatattggtgataccaatcttgctgatttcactgctggattgctcaccattgtcgtctgtatggcagttaaggaattaaatgatcggtttagacacaaaatcccagtccctattcctatagaagtaattgtgacgataattgctactgccatttcatatggagccaacctggaaaaaaattacaatgctggcattgttaaatccatcccaagggggtttttgcctcctgaacttccacctgtgagcttgttctcggagatgctggctgcatcattttccatcgctgtggtggcttatgctattgcagtgtcagtaggaaaagtatatgccaccaagtatgattacaccatcgatgggaaccaggaattcattgcctttgggatcagcaacatcttctcaggattcttctcttgttttgtggccaccactgctctttcccgcacggccgtccaggagagcactggaggaaagacacaggttgctggcatcatctctgctgcgattgtgatgatcgccattcttgccctggggaagcttctggaacccttgcagaagtcggtcttggcagctgttgtaattgccaacctgaaagggatgtttatgcagctgtgtgacattcctcgtctgtggagacagaataagattgatgctgttatctgggtgtttacgtgtatagtgtccatcattctggggctggatctcggtttactagctggccttatatttggactgttgactgtggtcctgagagttcagtttccttcttggaatggccttggaagcatccctagcacagatatctacaaaagtaccaagaattacaaaaacattgaagaacctcaaggagtgaagattcttagattttccagtcctattttctatggcaatgtcgatggttttaaaaaatgtatcaagtccacagttggatttgatgccattagagtatataataagaggctgaaagcgctgaggaaaatacagaaactaataaaaagtggacaattaagagcaacaaagaatggcatcataagtgatgctgtttcaacaaataatgcttttgagcctgatgaggatattgaagatctggaggaacttgatatcccaaccaaggaaatagagattcaagtggattggaactctgagcttccagtcaaagtgaacgttcccaaagtgccaatccatagccttgtgcttgactgtggagctatatctttcctggacgttgttggagtgagatcactgcgggtgattgtcaaagaattccaaagaattgatgtgaatgtgtattttgcatcacttcaagattatgtgatagaaaagctggagcaatgcgggttctttgacgacaacattagaaaggacacattctttttgacggtccatgatgctatactctatctacagaaccaagtgaaatctcaagagggtcaaggttccattttagaaacgatcactctcattcaggattgtaaagatacccttgaattaatagaaacagagctgacggaagaagaacttgatgtccaggatgaggctatgcgtacacttgcatcctgaaagtgggttcgggaggtctctatgagcaaggaatacaagacaaaacttcctcaatgcattgactatttcttcagactcaaaacactcattcttttttctattaagccattgaaagagaagcactaagactgcttctaggctttatttataaaataaacaccttatccctaacatgggcaaaatggctagaattattcagacgatttggcagcgtccagggtaagctggtgttataatacgctgctgatctacatcacagatttgctaataatgttcacgtgggccctggcatatctctgttcagttagagtgagtgctgacccaacagcctctgtggtcaagcgagtcacgaatgattaatcataaagaaaaatcagtttttgactgacctggatatccatgagctgcactgatcaccatgtaaggtcacatttagtaaatgctgaaataaaatgattaatgcatttatcaataaaagcctttgaaaatactttggataataaattggagttttaaaaatgcaaatttgcttagtatctaataatgaagtgttattacatatagccggaattgaggatctctttgatcctggaaatggtttacctaaaagctacagaaccaggccaatatattttgaaatattgatgcagacaaatgaaataataaagagattttcatggtttataaaaatcttttttgatatgataataatcatgatcacaactgagatcaaaaaaatatatgacagattattttgtttaaaaatgcagttttaattatcttagtctatagaaatgatcattgcatggaggcatgtataggtatgatctgtgtaaaatctgacataaaaacagtgctattctgagtgaaaatttttttgatgtgcttacataaccatggtgattaaaatgagtttatattttttctcaaaaattttagcagtgtgtaaagtaagtaatctttaactgaactctgaccacttaaaaaaaaatctaaaaattgaactacctatagtagtctgtgtttaaagtgaatttttaaagacaaagcattctaaatgaactcaatataaaaacattcatttggaatgtacatactgaaaaatacaggtttttttgaccaaaagtttttatatcttttctttttatttatttttttcctaagtgccaacaattttctagatattatatacaacacaggctttgatcttggggacttttcccatatatttcacactggagtgaatgaagttgtacttcatttctagagaaaagttatacccaggtccccaattgagaatgtcttgcttgattgaaaacgacatcatcccttggtatactccagggattggtttcaggacccctgcatttaccaaaatttgtgcacactcaagtcctgcagtcacccctgcctaaagatagaatggcttctctgtttttcttctgaaatacaaccagaaacaatgtgtctatttctgaaagaataggattaatgatcatacaaatgggttaatcctgaattctggttgtaaatctggttacagcataactaggattataatgctgcctcattttcacagcactacttgcttatattgacaacaaatcatctcgctaaagagtgaatgtaggccaggcgcggtggctcatgcctgtaatcccagcactttgggaggccgaggcgggtggatcacgaggtcaggagatcgagaccatcctggctaacatggtaaaaccccgtctctactaaaaatagaaaaaaagaaattagcctagcgtggtggctggcgggcgcctgtagtcccagctatttgggaggctaaggcaggagaatggcgtgaacccgggaggcggagcttgcagtgagccgaggtcgtgccactgcactccagcctgggcgacagagcaagactccgtctcaaaaaaaaaaaaaaaaaaaaaaaaagagtgaatgtaatagtcttgcagaaaatgaatgaatacctttgttcaataaaggaaatatgcactgctcacttttttgaaggaaatgccaaagttacgttttacaacaaggctagagtttgtaaattctgggttcatttgtgatgacataagtcagcaaactgcgggaatactgtctcttctatgtattttgtgaatagtaagcataattttagttttgtattatcaatgaaaatttcacttgaaattaaagctgccttttgttatatttttaacctataggataagattccagtattgtatatgagttttaacaaattaaaaaatcaaatcatgtacatttgaaaatatttgcacacatttaaaaataaatgtaaagttgtcttttaaactactcggatgtgtcctttctgaacaa

SEQ ID NO: 7 - DNA, 57175 bp, Homo sapiens
ctcagccttcccggttcgggaaaggggaagaatgcaggaggggtaggatttctttcctgataggatcggttgggaaagaccgcagcctgtgtgtgtctttcccttcgaccaaggtgtctgttgctccgtaaataaaacgtcccactgccttctgagagcgctataaaggcagcggaagggtagtccgcggggcattccgggcggggcgcgagcagagacaggtgagttcgccctgaagatgcccacaccgcccggcccgggctccactcccggggaggcctcgagggttgcggatgggactcttaagtggtcacggatcaggtgggcagggggcagtacagctttctttctgagacgccgagagcgaacaggctgctcggaaaacaggacgaggggagagacttgctcaataagctgaaagttctgcccccgagagggctgcgacagctgctggaatgtgcctgcagcgtccgcctcttggggacccgcggagcgcgccctgacggttccacgcctggcccgggggtctgcacctctcctccagtgcgcacctggagctgcgtcccgggtcaggtgcggggagggagggaatctcagtgtccccttccagccttgcaagcgcctttggcccctgccccagcccctcggtttgggggagatttcagaacgcggacagcgccctggctgcgggccataggggactgggtggaactcgggaagcccccagagcaggggcttactcgcttcaagtttggggaaccccgggcagcgggtgcaggccacgagacccgaaggttctcaggtgcccccctgcaggctggccgtgcgcgccgtggggcgcttgtcgcgagcgccgagggctgcaggacgcggaccagactcgcggtgcaggggggcctggctgcagctaacaggtgatcccgttctttctgttcctcgctcttcccctccgatcgtcctcgcttaccgcgtgtcctccctcctcgctgtcctctggctcgcaggtcatggcagcgccaggcggcaggtcggagccgccgcagctccccgagtacagctgcagctacatggtgtcgcggccggtctacagcgagctcgctttccagcaacagcacgagcggcgcctgcaggagcgcaagacgctgcgggagagcctggccaagtgctgcaggtagcggccgcgcgggcctgcgtagagagaagcggagcggggcgtccacgccttggggagggaagggcgtccccagcgggcgagagtggggtgcgggcggcggagcccctgggcgccagctgcttctcccagaggcccgactttcggtctccggtcctccacgccgcccttctggtgggagggtggctccatcagtctcgggcccgaaatgaacttacctgggaaactcgcctttggggagagtgggttctaggagccccgtctctctttttcctctctgaaggaaacttggagtgcctcttggggtacagtgggtccctgttgccttcttgggagcttgtttaaatgaaatgaatagggaaacccagctcttgaccaggaggagtccttgaaacactcaagctaagtaggcgggctaccattcagttagagaccaggatgcaagctagaacccaggggagcgcggggtgtgccaagtacttcatcagcaggctgtgggacccctggggaaagccaccctcagtctctaaacccaaacatgccgtaactagatgtcacaaacataaagaaattagagtttctaaaacctttcattatagaacatttcaaatatatgcataagtagacgtagtagtataatgaactccccacccccaccgtttttaacccatcactcggcctcaactgtgatcaaatccaagttactcttgtttcttgtatctacacctacttgctccctccagtattatttttaagcaaatctcatatagcatactgtctttatgtattttactgcatatctttaaagactcttaaaaaatataaccacatttcatgatcacaccttaatatctaaaaataacctcctaatatcaaaaattgagtcattattaaaatgtccaatcgtcccataaatgccttaattaaaaaacaatttattcaaatcaggagttataccacctacttttgatatttttctttcatctgtaggtcactgaatttaaaaactaccaagtagcaaggtataaggtatacattcctcatgctaagatttttgtaaaaactagctccaggcttgtattgccaaaatatactcagtgtgtttatcttctttaaagaaaataataataataaggcgcctggattaggagtctgaaaagtaatctccatttagagactccacatccatcagtctctggctggaccagaaaataggtttttgtgtaggaatattttttcagaggattaaaaatgtgagcgaggggtgggacacttaatcctgtgttctctagaagagtgcatttaaaaggatagatacagttcttggcaaaagcatggtaagcacttcagggttattattttccaggaaatacttatcctttttccaaatagttataaacatcagcagaatccagttcataactttgtgatttgcaaattggttgtgactgagattggattgaaaacccagttttcttgctttttgacagttgttcaagaaagagagcctttggtgtgctaaagactcttgtgcccatcttggagtggctccccaaataccgagtcaaggaatggctgcttagtgacgtcatttcgggagttagtactgggctagtggccacgctgcaaggtaagatgttggcagattgagagttctggtctccagcaggagtttaacacttctccccagctaccataggtctgtgacagatggttgcttacccttcaaggcctgtatctttcctgtagagccccttagtggagagagtcacctctcttctccccttccttagagttctcttcctgggaaactgctgccccactaggtgcagaggtccaatttagaggcatatactaggcagtggcttctcaatttttttaaattttattttatttgagacgggggctcgctctgtcacctaggctggagtgcagtggcgcaatcctggctcactgcaagctccgtctcccgggttcacgccattctcccgcctcagcctccccagtagctgggactacaggcgcccgccactacgcccggctaattttttgtatttttagtagagacggggtttcaccgggttagccaggatggtatcgacctcctgacctcgtgatccgcctgccttggcctcccaaaatgctgggattacaggcgtgagccactgcacccagccagcttctctattttcattgaccacaattcaataagaaatgtgtaaagagtttcaagtcaagatttaaaaaaaaaaaagaaatgtgttacatcctgatatatacatatatatctaaagttcctgtgaaatatttattataacaatgtgctaatctttcactttgttctattatgcttaggttttttaaatgatgattgcagcacattaaattattttatatccacacgtggatcttttttgttggtttgttttgctttgctttttagagatacagtcttgctctgtcacccaggctggtgtgcagtggcacgatcttggctcaatgcaacctctctgcctctcgggttcaagtgattcttgtgcctcagccttctgagtagctggggctacaggcatgtgccaccatgtccagctaattactgtatttttagtagagatggggtttcgccatgttggccagggtggtctggaactcctaacctcaagtgatccgccctccttggtatcccaaagtactgtgattacaggcatgagccaccatgcccagcctcccacacgtggatcttgaggtgtagtttgaaactggcttaaggaaaagtgaagggagcttcctagcctggactccacatgaatgttttgcctgcccctcatccctttttaaaaaaattcatcctcttattttaatgtgtgggaaaatgtgccaacataggtggttatttgttcttttataaactgagttcataccataatattcccataagcatcttagaaatctgttgtatagttggtgcctagcagcatggcattctcctctgtcccctatccccaccatctcgtttctgccccacccccaacaccctgaccaatttcccaaagaccctgaatcatgaaaacagaaatatcgttatttattataatttgtgaaacacctaatatgttccaggcactaggtatgctgacacgaataagatgcatcctctgcttccaaggaactcatagtccaatggagaaagagaaaacaattcaatgtgataagggctgtggcaggggagtgcaaattacttgctaagggagtgcaaatgaggttcactcaaagcggtcttaggggatcttgaatagcttcctggaagttgaatgtcaaagctgagtttccctgatggctaagtctgagtttgccaagtgatgggaagtagggtggggtggggatggcttgaaaatagactatttcagaagctagtaatgaatgttgagcaatattgtgagctaaaatttggctatggagctttcaagattgctcagatcaggccaggtagatgcccgaagagaaggaggatggcctatgaacccagggtggagcctcagcctgatcaagcatgttcttaatcacaaaggtggacgggagagagactaggatgggctgtgtggttcctaagttaaacaatgccaagtattctacactgtgctctaagggctgtgacatggtgacaccctgtgactcctgggggacaggaaccatgcctcattcatgtttgttcagcaggtgcctagcacagagacaggcacataatagatggtatatttagtgaaaaagattgaattgcattcctgataatgaatcttctttatatataaaaaatggtggttcatgctccatgtctccccagttttcatagacaagtatcttataagaattcattttgtttataagcatgagacactatgctaagtaagaatgttgccagctatctcatttaatcctcataacaatcctgctaggtaggtctattattatttcattttcagtaggtgaaaaaatctattaaatcttgcccagggtcacgtggctggtaagtggtacagctgggattttaatccggtgtctattgtgtagttccttactttatgggtaagatgcttttctagaaacattatctctataaagttttctgtgtaaggtgaatttctgggaggttaatctggctcagttacacatccatttatcattcattcacttaataaatatttataaactaattctgtagaccaggtatccagccatgtgcactcagtggttcattaacaggcacaggtgctgacttcatggagctttgtaaaattattttgaggggtagggatgggaattaaataagtagataaatagaaaaataattatagattgcaatatctattgtggtggattaaatatactgcaatagggattaatttgaaaggtggatctttatttttatatttttttgagacagggtcttgctctgttgcgcaggctggagtgcagtggtgagatcacagctcaccacagccttggcctcctgggcccaggtgatcctcccatctcagcctcgccagtagctggaactacaggcatgtgccaccatgcttggctaatttttgtattttttgtagagacaaggtttcaccatgttgcccaggctggtctggaactcctaggctcaagttatctgcctgcctcggcctcccaaagtgctgggattagaggtgtgagccattgtgcccagccaggaagggaggtctattttagatataatggtcaaggaagaacttactgagaaggtgaaatttagtaaaagacaagagaatgagaaggagacagccatgtgataagcagaaaaaaagagtgtaccaggtaaaggtgcaaaggccctgaggccagaaaacttagcattttccagggaggaagaggaagaattgtagtgtggatgagtgcagtgggggagggtgagtaaaccatgaaataaactgaggcaggactgggattaggatgaggtaagggaggcactcactctcaggatgcctctttaaatattgtaccctaggaaactcatttgcctcaccctattcctggccctgtggggatattgctgtgaattaaagggagaatgggtgtgtcagcttgaaccagatgatgcaggctatgaagagagctgcaagataggaatatattgtgcagcaagaatcactgacacataatgatgagtgtggatgaaaatcactgatgcctccaaggttgttggcttgagcaaccggatagatcattacatcatttatctaaatggcaaagacaggctgaggagcaggtttgggataggaaatcaagtttccttttggatatgctaagtttgagacacagggtgagacatctaagtggagatgccacctagagaagtgggagctactgcaagtgtgaaggttagaggagaggtctaggctagacataaaaatcaggaaagcattgctgaagaggtgatatttacaagagtgggaatgcctgtgattacctaggaagaaagggcaggtgtagaagaaaagagagccagagtacttagaagttaggaaggcaaggagaggggcagccaagaacctgagaaagcctggcgcaggaagttgaagacaaagaacaaccaaaggaatgtgggatcagaagccaagagagaaggtttaaaaaaaaaaaaaaaaaaaaaaaagcatagaggggctgagagtgttgaatttgcctgaggggtggggtatgatgaaggattacagactgcttttaagaagttttgccatgaatcagagggagataagagatgaagacagagtgaagggagaatttgtttttcttaatatgggagatactagaacgtatttgtgaaccgataggaatgacctagtagaaagaaagagatctgtggtgcaagaagtacaagagaaataactagaagcaaagtagtaaaaaggggcaaacgtggaggggtttgagaatggaactaggagaactactccttaaaggcaggagggatatttcttccattttcaaaggaagatagcccaaatggtgcagatgcagacgggtttgaaattttgatgaaaagtaacttgggagcatctcatgcattctgtgttttcgattaaatgcagaatatgtcccttaactttgagtctggtggagaagggtttgggcagattgaggtaagtaggggaggtttgaatagttgtctcaaggagaggaaaggcacaccccctgaggaaatgtaactgggtccccaggcagtgttgagtgcccatctagcacttgtggtcacacattttacatgaaattggttagcccagatgtagatgccttcagtccagtttatctagctgctcaaaggctctcatggataaggtagatgtttgaggtcagccaaattggggttttgccagacaagaaaaggaaggaaagagagagtgaaaaaagggagttaagaatatttgcaaaattccatggaatctgtgtgggcaagggtggaagtgaagacaggaaggtgtggaggatagagagaaagtggatcggttaattaattagaagcctcgtgagcacaaataaatgttgcaataaggattctgcagtagatgagctggaaggtttggaggctgtagctggagagaggctcaaaattcagattttggaggtggtggtgtggtttccagtgatgacaatgtccatgccacaaccactggctgagcagctgagtagtagaacaactccgagaagaccagctcaggttactgggaagccaggaagttgctaaggatgatgggatctttgtgatttttgttattaaaacaaattcccatcagacagcaaaagatcgatgcaacccttgtagtgctatttttattcacaactttaaggagtctgctgtctgctttctccttttgacttttatgtatttgtttgtttaaacaacagaaatttatttctgcaacatgaaggtgcctgtagattcagtttctggtgacagcccgtcaccttgctgcgtcctcacatggtggaaggctttacctttagaagaaatttaaatttaatataaatttcaactgtttattagcacctgctttgccagtatttgtcaccatgctataaatcatgactaccaacagagaaattctatcatttaaatcaatggctcagatttcttctaattttttttcttttttgagactctttctcacacaggctggagtgtagtggtatgaccttggctcactgcaaccactgcctcctgggttcaaactatccttgtgcctcagcctcctcagtagctgaaattacaggcatgtaccaacacccccagctaatttgtgtatttttagtagagacgagatttcaccatgttggccgggctggtcttgaactcctggcctcagtgatcttcccacctcagcctcccgaaatgctaggattacaatcatgagccatcacacctagccccagatttctttacaaattgtgtaattttaaaactgttgtaccaagtttctttataataaagatgattccagtatatttgagtagtagtggtccctaaatgggacactctgtatgaaaactgaaaagttccccttttccaggcatattaagaactgcagagcccagtttggggaaatggaagtttgagaaggacttgaaaaatgtccatatgaaatagacaagttgtgctttcatcccctgctccttcttttcttatcttccttctgtggagtcaccttcctattttattccatgctgttgggactactgactattgcaattcctgtttgtaatttacatattaaaacaattgtactaatagatatatttttctagaatacaaactccactagggcagagactttgttttaacagtgcctgacacatggtaggtgcataatcaactgttgttgaatgaatgaatgcttattgtagaaaactagaaaatacatataaggaacatgaaaaaatacctccactacaaactagaagtctcctctgatcctaccatacagataacccattgatatttcagtaaatatcttactaggcacataaatacttatctatataaaagtataatgaaatgtctggaaataataagcaccaaattcaggataattgttgccttctgagggtagagggaggaaagaggatgtgattgaggaagagtatactgagagtttccgctgcattggcagtaatttatttcttaagctagatgatggatacatgaaagtttattatattattcattgtgtattgtgtttcttgtatatgtaaattacttcatattttattcaaaatacctccagatttttttttttttttgagatggagtcttgctctgttgcccaggctggaatgcagtggcgcaatctcggctcactgaaacctccgcctcctgggttcaagcagttctctgcctcagcctcctgagtagctgggattacaggtgcctacccccatgcctggctaatttttgtatttttagtagagacggggtttcaccatcttggccagggtggtcttgagctcctgacctcctgatccacccacttcggcctcccaaagtgctgggattacaggtgtgactcaccgcgcccggtccctccggctttttttaatgcgtacactcccacaggctggagtgggagtgtattttttacaaaagaggaagcatacatacctatcagttttgaatcttgattttactcacttttttccctcttacttcacatctctccacgttactgaatgtacttctgagcatcacatcaatttcatttcatagaattacgaagtatgaagcataacttagttaaccacttccctgcttggggacattcatctgataagtaatattgagtgtgtgggggccagcatattcaggctgttgccatttttaataaactactataaatgtaattccttattaatgactcaagagtgaaaaggcttgattttctctcattgtgagtgagtgaagggtgaggaggtaaaacggagtaagatatgctggctacctaagtatttaaccaaggaaaagaatgtcattatcctcttctaaccctcatgtaaactagaatgttgatttctctatagccaggcattaatgggtctgggggctgctgccattgcctagtggaggagttggtcaacttcatcagggtagagttgtcttgtctgctgctgagtataattatcatattttttctttgggtctaacttttcttccccaccaaaaaaggagaaagggcagtgtaacaatgactgtgtccctcagaacgcagagaaatattgagctcagacacaactgcctctgtgcaaaactggtctgagcctttggagtgaattgaccaaaacttttttttttcttttttagacataaggtcttgctctgttgcccaggctggagtgcagtggcacgatcatagcttgctgtaacctcaaactcctgggctcaaacaatcctcctgcctcagcctccttaataactaggactacaggcgtgaaccaatatgctgggctcattcattttattgtagagatggagtcttgctatgttttccaggctggtctcaaactcctgggctcaactgatactcctgcctatggcttcccaaagcactgggattataggtgtaggacaccaggcctgaccaagtttttaatcaacatttgacttgattgttttttcccactgatctgattggtggaagactgaattactgatcaactgagtccattcatttgagcaggtgatgtttgtagatgcaatcattgttccaggtgatttggatcctgttctgcatcctagcatagccagtctgtatgcaagataaggagaccaactcaggacaggctgatctgttgaaactgtaaattgagagtatctgtgtaaaggcccttctttctgcagtagaaagacagatgctcctctacttctcatgagttacatcctaataacccattgcaagttgaacatattttaagtcaaaaatgcacttaatacacctaacctatggaacatcatcgcttaggctatcctacctgaaatgtgctcagaacacttacaataacctacagttgggcaaaataatctaacgcaagcctattttataataaagtattgaatatctcatgtagtttactgaataatgtactgaaagtgaaaaacagaatggttgtatggttacttaaagtatggtttctactgaatgcatattgcttttgcatcatcataaaggcaaagtcataagtggaaccattgtaagttgaggactttctgcatactgtaactttggtttgtgaatgtaatcactttgcatgtgctttcagggatggcatatgccctactagctgcagttcctgtcggatatggtctctactctgcttttttccctatcctgacatactttatctttggaacatcaagacatatctcagttggtaattataagtatattttacaattatatttgctcatgtttaaagtgttttggctatattaagtgcattatacctctattaggttggtgcaaaagtaattgcggttttcacaattatacttttaattgtgaaaaccgcaattacttttgcaccaacctaatatatctgtgttaatgttgtcagggaaatgggatttcagtgttttgcctgctttttctattcactgatgttaggtaacttttttaatgaagtggaaaaataaaaaaactgaaaatgacagcctactttaacattttagcatgttttgctttttaaaaacgtgatcaatttgactccatttttggagtcataatgacagggaaaaaatgacacaaggtctttgaacctaccattttactggattaacttagaaattactaagtatgttcatcaaatacatgttcatgatttaattaaagagcatacttattttaaatcactaatattagaagactggcaaaatcttaccaaaacaatttagaagctaagcttggctttctttcttggtatggcttataataagttttcctgctattcctaaaatttgaattctcgtttgttagaatgtcctagtaaatgagtgttttaatgctattttgtgactttgacatttatactagagaaaattttgctcctacatccatctgctggctagacatgtctacctcgatgatcctcttgaaataaatgcaaccatctactttatccccaacccatgtttttgtccttagttgtatttccttagaaggagatcagaaagaggttttgattgaaagaacttccacaccttggagaatcaatcagtgttgagtgcttgactagatgaggaacatggaagctggtttttctctttggtattctatacattgagatattccaggtgactggggttgggttttgagacctcaaaaccataaagccttccatgatgagagggtagaatcatcatcatcgtcatggataaaaataacagtagtgaacggagcaattgctgaaaaaaaaatattttttaaaatataaaatcttacagattgacatttgatatgaaaaaatgttttgtcttacaaaaagagaaagaaacttcatactccctttgctgtttttttaatcctaacttcgaccctgtgatattgatcaaggtactcagatccacagagatcaggacattggacactctaggaaattaatgagattatatgaaataaaagttgagcggaacaagtaaacactcaatgtatgtgctacctttgccagaaaacctttcctgacaactctcatccctgtccccaccacccatacacatgaggatcacacacagacaggttagacgaccttttgatatactcacgaagcatcctgaatgttgtattctaataactacctacgtgtctctctcgcctatttctaggtcatgaatgcctcgagatatctgcgtttttagcttctttttgttgttgttgagacagaatctggctctgtcacctaggctggagtgcggtggcgtgatctcagctcactgcagcctccacctccccagctcaagcaatccccccacctcagcctcccgagtagctgggaccataggcacgcaccaccacacccagctaatttttgtcttattttggtagagatggggttttactatgttgcttaggctggtctggaactcctgggctcaagcgatcttcccacctcagtctcccaaagtgctgcggttacagatgtgagccactgggtccggctcagcttctttcgtgaacaaacaatattttcctagtcacagctaaatcttttatacattttttaaaccctatgcagacacattgaacatttgtgattaataactgattaattgttagagactttttttccccaggaccttttccagtggtgagtttaatggtgggatctgttgttctgagcatggcccccgacgaacactttctcgtatccagcagcaatggaactgtattaaatactactatgatagacactgcagctagagatacagctagagtcctgattgccagtgccctgactctgctggttggaattatacaggtaatgaacttacaagtaaaatatagatggatgtaatttttatttgaaattaactttaaagcatatagacttaaagattctactaaaaacaaaacaaagtaatttcctggaacccaaaattattttctaaattacgttgttttaggtcaggtgctaaaatagtaagcaagaccccacttattaaggctcacttatcatcaaagtcagagacagaaaaaagcacagaagaacatgtgtgattcaattgaggatgagagaagggaaatatacgggaatccataaaggagaaaaagtgttctggtgagcggagacacaggaccgaaagccacataaataagctctgggtttttgcttttctaagtacatgtatagaaatacttcaaggtttttattacacttagttttcaaattttagagtggtggaggaaggggagtgatagggtattaagaaattcatatttttttctaccagtatttttgtgctataggcaggctactagtgttttcattggtattaagcttgatgtaatatttccagagagtaggtttctatctcaggcaaacatttaatttttctttccttttccttatcgtagttgatatttggtggcttgcagattggattcatagtgaggtacttggcagatcctttggttggtggcttcacaacagctgctgccttccaagtgctggtctcacagctaaagattgtcctcaatgtttcaaccaaaaactacaatggagttctctctattatctatgtaagtgttgcttcttgctccagggatgggtcactgttcattccagaaacaattgtattcattctctgagtctgggccaggcgtggtggctcacacctgtaatcccagcactttggaaggccgaggtgggcagattgcttgagcccaggagtttgagacgtgagacctcatctcttaaaaaaaaaaaaaaaaaaaaagaaagaaagaaaagaaaagaaaaagaaagaaaaaatccaaaaatccgaaaatttgctgggtgtggtggtgcacacttgtagtctcagctacttgggaggctgaggtgggaagatctcctgagccctggaggttgaggctgcagtgagctgtgatcgccccactgcactccaccctgggtgacagagcaagaacctgtttcaagcaaaaacaaaatcaaaacaaaacaaaacttgagtctgggagcacccacatttctttctttctttctttttttttttttttttgagacagagtcttactctgtcacccaggctggagtgcagtggcatgatattggctcaccacaacctccacctcccgggttcaagcgattctcctgcctcagcctcctgagtagctgggattacaggcgcccgccaccacacccagctaatttttgtatatttagtagagacagggtttcaccatttgggccaggctggtcttgaactcctgaccttgtgatccacccacatcggcctcccaaagtgctgggattacaggcgtgagccaccgcgcccggcctgggagcacccacatttctctatgcatactttgggagccattgaaaacatttggttgcttctgtcagaaatactattgtacttaaaaacattaatgaaaacaaagtggtctaatgaagtaaaggctgctctggaatgtaacagacttgatttctagcctcagctttgtctctaacaggtaagtgaccctggatacatcatgtagggtgctaattgaaagctcagttttagaactggatggaccttgattcatattctggctctactgtctactagccatgtgagccaatcaccatgcctcagtttccttctctgcaaaattgggttagtaatagtatatgcctcattggattgttaaataagaatagataagcacttggcccaggggctggtacataacaagtactctaaataaaggagttattttgaaatgattatttcaagccatcttttcttttttattggtgaaatgaaatgattggagatgtatctctaaaagctttttctaaccataagagtccgtaaaatgcataatgtaaatgtctcaacaattataaatgaaaaggaacattagattcagagatgattcaccatgcaaaagaaatgcaaaagcaggatgtagatcacactaattagatttgaaaaaggttttggatctaaaaatgtgttctacataaagcatgttattgatgcttgaaaaatggtgataatagtaacatgatgtcatcctagcttggggggaatgataccatacaaaaataacgtgtcaacattaagaatggagtttgagtctttaaagacccacctattagcttctaaaacaatgtaaggccatgtacacatatctaagaattggtgagtatgtcaataattgctcaattttataacggtgccataatcccatactattacactccatccattcaacaaatattaccaagtgcttactacaggccaggtactatgctaagcagtgagaatagacagaggaggcagaataacatagtgaataagatcatgaggccaggtgtggtggctcatgcctgtaatcccagcagtttgggagactgacacaggtggatcacttgatcccatgagttcaagatcagcttgggcaacatgacaaaaccttgtccctactaataatacaaaaataattagacatgcattgtggcacgcacctgtagtcccagctacttgggaggctgaggtgagaggatcacctgagctcaggaagttgaggctgcagtgagccgagatcatgccactgccttccagcctgggtgatgggagtgagaccctgtctcaaacaacaataacagcaacaacaaacaaaaaaccaaaaacaaacaaaaaagatcatggactttgaacttcaacagacttgagttggcatcttggttctccacccactacccatgatgtttatactcaacttccctaagcctcagtgtcctcaattgtaaaatgggagtagtaatagtagctacctcttagagcagtgaggattgaaaaagaaaatacgtgtaaggcacttagcacaatatctgtcacatagtaagaattgagtttattattattattatcacagatgaatagacctcatgaagctcgccgttcatttcctcgggacccagcctattaggaaacattagcaaaagtttttgattcagcattatatgggtcattcttgatatgttttttcctgtcaaatcctcagttttctattaaaaaagaatttttttttttttttgagacagggtcttgccccattgcctgggctggagtacagtagcacagtcatagctcactgcgacctccatctccctgtgtcaagcgattcttccccctcagcctcatgagtagctggaactacaggtgtgcaccaccacacctggctaattttctttttctttgttgaattttagtagaggcaatgtcttgctatgttgcccaggttagtctcgaactcctgagttcaagtgatcctctcactttggcctcccaaagttctgggattaaaggagtgagccaccatgtccagcccatattttaaaattaaaattaaaattttaagattttattttggtagagacaggggttttgcaatgtcgcccaggctggtcttgaacccctggcctcaagcagtcatcttactgcatgcctcctaatgtgttgggattataggtgtgggccactgcacctggccaatccttagttctttttgagacctctgactgccttattttgacaggctctgtaacttttgcagctcctggcacatcttgcttttacttacttttacattttctccatcaaatgttcactcatttattccttcattctcattcattcagtttatctactcaataaacacatattgaatacttaccatgtgccaggcactgttcactccctatacaaacccagtgactcattaacctaccaagacatctcttactgagtattctcacctcactgggcaaacattgctaggccttcatctacacagatcgcaggaggtccaaactaattgttgacctgggtccatggccatttcaggacccctgcagaacaggagaaatagttcttctggtctcataggattatgtttaagaagaaactttctgcaaatgatttcactttgacagggacaaaagtgagcaggaaacactagaccaaggtcaaaaatagtttttaaaccaagtgcagtcattatgtaacttacttcctgttgaatatttttcttgaaatctcagtttagcatacagcatagaattttgcaagaaactcctcacaggccacccaagttggaaaaggtatttcagtcatccctatatggtggtgaatataagtttgctcttctgaaaaaaaaaaaaaatcagcaggtctgaaaacgattgcatagggttaaatgagccgcttagtctctgaacagagaattttgcttatgacattaccattgcaattatacatgaaagaatccttcaataaatgcagagtagtagaggattctcccagaaaagactgtaagattgttgtaaaatactttacctggagtgttaacttatctttgttctaaggttgcactttggtttgtcctgccctctcccccaaaaaggtgctgacaactagaagtaacaaatgcaaagaaataggggagaaaatattagaagaaaaagaaatcagttaatttacaaatgtcagagatactggatgtaggaggcagaagggagaatgacagggtattggcagcaatttagaattagtcaatacccttgatgctaccatgtagctactcagttatctaagtaaatcccagtccacttaggggttgatttcccaccactcaatttgaatggtttgtctcagtagacaagggtgagagctttgaaagccaccactaagcttgattagatttgttactttgtacctatttcagtatgtaaaatttatacattgtattaaagtaacactttaaggattgatctatacatgtatacacaaaagatatggaaggaaatgcctgacagcaaaaggtggtcgtgaagcatttgtgatattcgtagagataaaataaacaaaaataaattcagttccaatagtaaactgatcaattttctcatacacattattgggcataattttttcttacggtttcataaacacaggtaatcctgggcaagaacaaagaaattatctaaatgaaattgtcctaaaattttccaaacacagcaggaaatataataaaatattatctattaccaaaaagttcattatcataatttgaattatttggaatactaagctaaaatacagaattatatgtgtatccatactattaacatactttatggtattttaacagtaaactaaattagaagtactgttcagtgtttttgtagagtctaatttctatgtcgttaaatataatcttatattattatataatataatcttatattattatataatcttatattattatattatataatcttatattatataatcttatcttatataatcttatattatatgctcttatataatataatcttattatataatcttatcttatataatataatcttattatataatataatcttattatataatataatcttatcttattatataatataatcttattatataatataatcttatcttattatataatataatcttattatataatatattcttatcttattatataatcttatcttattatataatataatcttatcttattatataatataatcttatcttattatataatataatcttatcttattatataatataatcttatcttattatataatataatcttataatataatcttaacttattatataatataatcttattatataatcttatcttattatataatataatcttatcttattatataatataatcttatattattatataatcttatcttattatataatgttatattattatataatcttatcttattatataatgttatattattatataatcttatcttattatataatcttatattattatataagtataatcttttattatattattacataatatataagtataatcttatattattatataatattattattatacaataataatgtaaactgactattgcagtttacatggtgagttttatttctgcacagattaaactttctatcatagagctcttcttaaaagattctgaatgactactcaatatgtaggcaacttatttacatactcagataccttgcatgatgcaattctgtaatataaactgattttggtttttgaacctcgtgttacatttctaatccaccagacatactttttattcaaaggtctaattgattctcatggattaaactggaatcctgtagtgattatttttgtaaggtaaaaatgtttgtgtgattgggataatgattccaaatgttttgtttttcaagttttaatttttgcatcttgagttgaaaagtacacctttaatgaatagacaattcatcaaaatgttatacctagctcctgaattaattagggtcattcatcagaaaactgattatgtaaaggaccaaacagcaatgataaccttcaagcctctgggataggtagggctgtttgctcctgtgctaaatgccctaagttcttgttatcgtgtctgctggtggtagttatcccattttctttttcactctgctgtccctggcatcatcttgtttctgtcagtgtaaatgcctttagcaattttcagtgactctgaaaaccagacaaagtgaatttgttagtactggatttcaagaaagagcaaaagtaccctctgagtgaaagttcaagagtcttcctacaagttaaatgcctgaactctagtccaagtgtttggtgggaggtattttgcatgcataatagcttctcccccatttccttactcttcttgaatgtgttccagagagctgaggttgctggcaaagtgactcctagattacttaaggttcattaagtacttaaagttcattaagctcatacataattgtcaccagattatcattataattattttaaaagtagtttatctgtgaaaataagtaaaatacattttataaatgttataaactataagatgctccattattttatcttcctataaaatatgtctataaaaaagctcatttaaagaaaagttaccttcactgtgagattgtctcaaagaaatgtctcaaagataccttcttaaatcctgccttctacaggactgaagttaatataacaaagatattagtgttcttccttgggattcttccttgctaatttccttgaaaacacccttgattcccagaagtctcctatttacaaaacaaaactagtttttcttgaattgattcatctgtctacttaaagattttttttggccagttgtggtagctcatgcctgtaaccccaacactttgagaggttgggcaggaggatttcttgaggccaggagttcaagaccagtctgggcaacaaagtgagacaccatcccctgcccccacctcctcccgccccaatctctacaaaaaataaaatagcctatttattgtactctctacaataaataaaataaatatagatgcctgcctgtagctccagctactctggagggtgatgtggaaggattgcttgagctcaggagttcgaggccactgtactccagcctgggcaagagagctaaaaaaaaaaaaaaaaaaaaaaaaaattttttttatgttatcttagttcaagtttgagaaataaaattaagtaccaaatttattcccaaaaatgtatgcttgtcaggagatatacctaatgttaaatgacgagttaatgggtgcagtacaccaacatggcacacgtatacatatgtaacaaacctgcacgttgtgcacatgtaccctaaaacttaaagtataatttaaaaacaaaaaacagaaaaaaactacagattcaattcagctttaggaattaaaaaaaagatttgatgtaattatatcattataaaatcaaattttttaaataaaacatgaaattgttttaatttaaaaaaaagtatgcttggcctatatgtcaattcaatagcttttctttgccagaaagaatgaagtcagtctacctgtatccacatatgaagtattttaggattttttgtaattttttgttattatctatatcattcaggtttaggaaagaactttacctaaaatactggctaattgtgccccaaaaaaaagaaagctagaaagaaagaacacacacacacacacatacacacatatacacacacaaaaaaaacaaccaactgatcaactgggagtttcaggtttatcagcctttagtctcaatgctgtatcactgtagtaaaaatcaggctacttgatagcacctagaaacccattttaaaatataaacttgtaaagcatttctgtaagtaaaagttagtatgtttataatgacattttttcttttaagacatctttattattatcataaaaaatacagagaagcaaaaataagaatgtagaaatcacccagtttttcctttccaagtaaacaatcataaaaaacttggtgtatatatatattgcagcaattgtatgtatgtaatggtctctgtatcaaccaacacatttttatcattttactgaaacttttgagtgttgtttgatgctgatatcatggtttttcatgtgggaagattcatatgagaattgattgtgtgtgtgtgcgtgtgtgtgtgctcgtgtgcgtgtagcagcaggaagtatataaaattattttctttttatagacgctggttgagatttttcaaaatattggtgataccaatcttgctgatttcactgctggattgctcaccattgtcgtctgtatggcagttaaggaattaaatgatcggtttagacacaaaatcccagtccctattcctatagaagtaattgtggtaagtagaatatgtagttagaaagttcagcattatttggttgacaaacaaggaattattaaaaccaatggagtttttaacatcttttgttttatttcagacgataattgctactgccatttcatatggagccaacctggaaaaaaattacaatgctggcattgttaaatccatcccaagggggtgagtgtggtgttcctcttagtactaatacattaagtcagtaagtcagtcttttttatttaaataaaaccttttattacaagcttcatttcactgatactccttcaatagtcctatttgtgtgtgatctggaagaaacaaccataagacaaacagtatgtgtgtagataaacgtcaagccatttgtttaaaagcagcccgtatatgctcttttttcttcattttcttaaaacatggcagaacatgtacggttaacaccagagtcctgatttaaacttatacataacattataatataatataaatagaatcatttctcagtaacatctattgcactgtgaacaatctgcttaaggaatcagggacgtctggcctaaattctctatcatttagtttaatcaattttggataataattatatcctcgtacccataagtaaaatgcattatcttcaagggaagttttagaaacatttggtagtttggtgaattagaagagtaaaagatcaaggtccttcattcatctctgtcaccttccagttttgtgacctgaggagattctcctatataagacaaggataatgaaaacagccgaagcctcaactcaagcttattatgaaacaccagtgagatctctcatgaaatgaagagtagtcaagacaccctacaccataattttctcatatggggttacaaaggaggcctagacgtttattatatttgtaacatacactcataacatttaagactagacttgctgttaatcaagaagtactagttttccctaagactggaagagtttggtaccggtgtttctaccaggaaagggagtggaggggagggaagggcacggagccactgtttggtaccagtgtttgttttccatgctcttaatagaaacttcctcaggcaagcttattcccagagcttattctacagggaactgctgtattcccatttgatgaatcttataatttcctctaatatctgttccaaactatttgaaaaagcacagctggctacatgggacttaatttgcatgctatccattacagtgtttctcaaacttacccttttgtaagaatcacatgggatcctttttcacacagattcctggttcccaccccaaacctattgaatcaggctttccagaggtggggctcaggaattaatatttttcaaaagtgcctcaagtgattcttgccctcaaggaaactggagaaactctttaagagaggatcaacaaatctaatctaacaactagataatttcattagttagaaacaattacagaaaaagatactttacagatctcttttgtcaggcttcctaggatgtatcaagttataggtggtccacagagcaggccctgtcccatccatccgtgttccattagttggtttagggaactcatttcttctgccctaaattatccctccaggtcctctgcagagctttcctgtgctctcctcctgagaacagatttctagcctctcgcccttgagtttaatgaagctgaatcctttgacagaccacctggtcagcttggtcagctaatttaacctgcctggccccagggactttaagctactccatgagggcagtgaccccattggtgttgttcagctctgtcccagagcacagagctcatctcacagtaagctctcagaaaacacttgttgaaggaataaaatacccaagcctatgtcattataaacaagccacaacaaaggccttggttatctgatctcacttggtagcacagaagcaattctgatgatattaacaaacctgaaaaagaaagggagtggagagattggaaaaaagcaagcagagttttaaagtggccctgaggtgagcacagtgaaaggaagagggacagagagattgtgatatgcccccttttgatctcctccctgcttcaatcctccattaaggctgctgctcgtagttccctttatcctattgagggtccataagttaggatcactcctaacctaggaccatacgttaggaccataagttagtccccaataacaatgccccattggacagccaaaaacagtggctccatgcccttccctctactccctttcctggtagaaacatacaacttttccttgtccagtcaacacctaagcgccccactaggattcactcattctcccatcctgggtgctttcttaaccagcagacactatgagggccagtcatgtgcctctcttctcatgcaactggtccttatctgcaactcgtaatctgcccagttcctcactcatcctgcccaggcttctcttttacctcttctgttatagtggtgtgtgtgtgtctgtgtgtatgtgtgtgtgtgtgctcacgcacgtgtatgtgtaaacccataacaagattgacagctctgtcctctaaattttaatccctattcactctcttgcctcctgtccttgccagttccagaggtccccttgttgtcatgtttgttactctcttttttcttttcttttctttaacagagtctcactctgtcacccagcctggaatgcagtggcatgatctctgtggtgtgtgtgtgtgggtgtgtgtgtgtgtgtataaacccataacaagattgacggctctgtcctctaaattttaatccctattcactgtcttgcctcctgtcttcgtcagttccagaggtcctcttgttgtcatgtttgttactctttctttcattctctttctttcttcccttccttccctcccttccctccctttcctaccttccctcccttccctcccttccctccctttcctacctgcactccctttcctccccttcctaccttccctccctttcctccccttccttccttccttcctctctctcttttttctttctttctttctttctttctttctttctttctttctttctttcttttctttctttccttctttctttctttttcttttcctttctttccttttctgaaacagaacctcactctgtcacccagcatggaatgcagtggcatgatctcggctcactgcaacctctgcctcccaggttcaagcaattctcctgcctcagcctcctgagtagctgggacaacaggcacacactgccatgcctggctaatttttagtagagacggggtttcaccatgttggccaggctggcctcaaactcctgacctcaggcgatctgcctgcctcagcctcccaaagtgctgggattacaggcactgttatagaccccttttgtcaggtttcctaggatgtatcaagttataggtggcccgcagaacatgccctgtcccatcaatctgggttccattcattggtttggggaactcaggcctactgttgtttttaaagtatgtgctttgcagttgtacttgaaagtgtggcacaggggcaaagccaacaaaaccacagggtttttttcctggctgctttctgagggctactcttctcctctagctggagtggtggtgcatttgccaagtgttcagacccagtctgaagtactctggtattctgtttggtattctgtttatgacgctggcctgtcgtttgtggaattttgggcccttcagggttcacttctcccggtcttcatcttttcagataagtgtgtgttcacatgctcactcccttgggctcttcatagtgttgtcttatgatcaggcctgacatgcttggctggggccaaacaggcccactgagcaaaaaatttggagagttatatccacagaaggagggcaagggcaagggcaaggacaaaaggcttacttacaggtcattagaagatatccagacgggacttcaattggtttggggcaaataattggcacacttagggttcagcaagacagcagacatgagtggcaggagtatgacagacttagattctcccaatatataccaagaacctactatatgtgtagacactaattacttacttacacaagtgattcctcattgaatcatatgagaagaatatatagtccccatttgacagctgaggaaactgggatgtggtgggtttaaataacatgcctaaagtcatttgagagtgattctggtcctttgacttaagtctttgcactttacactttgcacacctggataatcaaggatcaggtcatatttggagaactaggcagccaggcaggcaaagtgcattaggctgctatcaaaactaagctgtatgtgaaactggaaagttatcctgacaagtccgagtgacctgaagtagggttgactgggtctcaggagcaagtcaggagcctgttttgagaagtgtggtcccaagtcacatcccaactagcaggtgatgtcatgctgagtcgcccaactgttggatcagggtttccaacatcctgtctgtctacagatggggttcattccacagtctcattgtggggtaggatgggatataaggagaaaaggagtctgaaaattaacctcactggtagggagagtaaggctacaagggcagagaaccagacagatcttgttaggtaggaaatcgtctaatatctaacatttagacctggacccactaactgacatcaagcaaatcacttcacgtttccaggtctaagttcctttatcaacaagacaagacaagagtggtggattcaacaatacctaggatgctttctctatggttttctctaagaaccttatttctattttatttttaccactgttctctaattataggggaaaatgtagtttccttattaaagaaactttaggcataagtgatgtaggtcggggagacctttcatggctgggggcctctggaattataccatatggatagtcatcaagatataggtccatctcccaaattttcatatttgagagaacctcgtggtataatgtgtaggttaatttttttatatggtttgtagggtagctctggttttgtcaaacagtagtcattggaccccacaatcactgagatattttagtcactatggagcgttgtgataattacattaatttaatcttttttgccttaagaagattttaaatgtcctggctctcaaaggattttccactgagctcttttagcttcatacattctttgtctctttaacagagctgatacctcttcaaacacagtaaatctcatattatggctagaatctcttttaaattcaaagaactttaagatggaattgtggaaggagaaacactaacatgtgaaatggcatggatggggctgtatgatattaaagaatcagtaacagcagatttattcatgtgagagatagagaagagtcagcatggctaggctcaaaaatagaggacaaagaaatcagccagtaagataacaccaacttctgattaaacattataaaagctgctactatcatgtatgtatttcgtgtgctttttgttcttttggatcaagtactttcatgtctaatatgtgactgagcagatatagcatttgatgagatggggaaaaaggatggtggtcaaatcttcacagcatttttcacttaaaaactcactaggtttttgcctcctgaacttccacctgtgagcttgttctcggagatgctggctgcatcattttccatcgctgtggtggcttatgctattgcagtgtcagtaggaaaagtatatgccaccaagtatgattacaccatcgatgggaaccaggtatgggtgcccttttgctgaactggttttatagggctggaaacaggaaaaaaacataaatggaaaagattttggtgtcagctaaagaaggggttggattctttcaccagaccttattgggttggttttcctcttgtgtttgctaattagaaattattttggaatagacacactgcatcactttgcttttttaagaaataagttgaaataacactaattttaaaagagctaattcagtcaggtcataaataacattcaaagtgaacatattaggtcagaaagagaattcttcatgtaacccagtacctcttggcaattatttttaacggcagttataatgtgacaaaacagtgcaacaaacattaataatagttgtgaccactttaaattgaggtggttcactgtgcagttaatatatacaggcaatttttgtaggcatgtgatacattgccaggtaagctgatttcacactgcttgcaaatttgcaagttctgtatctatatgtttctgaaaatacagtatagcaataacagtagttaaatggttagtaatcaagcagaataacagcactgctagtcataatatgcttcatagtgaatattcaaccacagaaaaacactttatgtgagagctgcagacattccattcactaggcagtgaaaaagcttagcaaatgatcaggtgctatttcttgtcaactttaaaaattatcgagagcaatgagacctctctcagatggtatggcgtccaaactcctgatgtcgtacaaggaccccaagtacctatcacggtaaaaattaaattggaccaccacgcagagtaggcatgggagttttcattcttaatgtacttcctgaaatactcagcgaaggtcttgcaaagattcaatttgtaggatcgttgtcatccagtctcttccttaggaattcattgcctttgggatcagcaacatcttctcaggattcttctcttgttttgtggccaccactgctctttcccgcacggccgtccaggagagcactggaggaaagacacaggtaggaacaacagccttatgatatccatctcagagaacaagtcgaggaatggcaacagaggaaggctcgcaccgagcttagcaggacaatttgcctttcagacttgtacttcctaatctgattcacctcaggcctattcctcttgttccactccctcacctgaaatctcttaaaaaacaacatgtatggttttctgatacagtgattctcaaatctatttgtcagtgcttacctgtcatgtagctacacttacctgctgtggtcaataacaactgacaaggaatcagtaatgaaggatgctgatttttgttaatttgttacctggggagacagatggcctggtaaaagcgcttcctggctttaggagctattctattttcaggaaagtgaaaagctctattcacatttcctttagaaggatcaggaacttcctccaggggcgtttggtcccacagaacaacagtttgctagccaagaatatttttgttgtaacatttttggcatttcttcctgagtaagatttatgttgttgaagttctgcatgtgggtttaatcttatcttttaaatgtggtttgcagttgttgcctttacaaggtggccaaaaagccagcatcctagttaatctctggataatccctccttcagtgttcagaaagctcaggagccatactcaaaggccactctttccagcaggacacagtcgaagagaccacaccaagcagatgggcacaagagacagactcaggaattttgcttctgtctcttatgccttgaggtccttatcttcccaacacagaaagaactattatttaggagtaagaagtgcattgagactccaaagaacaacaaacccaaactacatagtgcaatacacacacacacacacacacacacacacacacacatgcacacacacatgcacagtcttcacagtcttcaaatgggttttactaaggcggggacacttaaaaaataaatataagtcgggcacagtggctcatgcttgtaatcccagcactttgggaggctgaggtgggcggatcaattgaggtcaggagttcgagactaacatggccaacatggtgaaaccccttctctactaaaaatgcaaaaattagccaggtgtggtggtagatgcctgtaatcccagctacttgggaggctgaggcaggagaatcacttgaacctgggaggtggaggttgcagtgagccaatatcgtgccactacattccagcctgggcgacaagagctagactctgtgtcaaatatatatatacacacacacacacacacacacacacacacaaacatatatatatatatatattctcatatatatatacgagaataactgaaaaaactaatgactccaacagtgacttgcccagggagggctttaattgtccccaatatgcatgtgatgctcctttcctatttataatggatcttgtgacagacttggaagaattggcctcttccagttttttggctgcttttcaacaaaaaattttattttcagaatttttcttaattttttattttttttgcaaatatttccagctctgagggagcaggtaaaataatacagctcatatccggaggcatagccagagatctgtggtcaaggggaagaggtcagagccaatttccaaagctgtgcacatttcaggctgcagctgtcagcagcaggaacttctgctgctttcatttgagacggagcactgacaagctctccagagcacatggtcttcagcgggtgcaggcaaatctcaaactgctgatgtccattctcctgatgttacctccaggctcaaatgaggcatgggctggctgtcccagtaagtatgcccatgtaaagtgacctccttggcacagggtttgggggataatggtgctctggtaagctaataccccctgccacatactggcatgtattatatttaggaatgaaggatgccaggatttcagcattaaagaatgaaacgagtaaagaaatggcttcatgtttaattattgaaatgtatactaaattctggggttaaaagtctaagtgcctgaactgaaatccagggactgatggacaaataaactggcagggcttctcttgtgtggcttctcgtgttttctcttatgttggaacttcagtttcagcatctacaaaatggaaatgataattgcatccatttcacagggatattgtgaggattaggcaagaaaatgtaaagccttagcacatacttgtaaatgctcattgtttcactcctttaggcaagaatagcatcttagcatctatgatacatatattgtgcctggcacataagaagcacctggcatatatttgctgaatgaatgaatggaagaatgagtattggtggacacgaactgtttttagcacatctacagattgtagaagaattaaacattggaaccttttctttccctcacccccatctgacttccactgactcacagaaaagtaattctgattacaaaccactctttagctctgattaccccctcccttaacagaataattttttagtaactgaatctggttgtagatataaagtctacagagtttctcacaaacaagccttatcaagtaagtagaaataattgatcactcaccaattttaatatagtggccaaaatgagccttggcctcccataattggagactcattatgacatataattggcaagtaggtggccactctcctggcatgagtttggcagctgactgtggtccttgtccccaaatctccatatctttctccagttcacagagctccccatccacagtgagatgcaagtggctcggtaaatactggttgagtaattgcatgcaaggaaggaagggagggataagggaaggaaagaaagaagaaaatggaaggaaggacaagggagaggaagggaagggatatgaaggaaagcgaagagaagggagggaagtaggatatcagcttctctgcttagtcaggagaagggaaagagcaccagggtactgggaatctaggatggggataggaagagcatagaaaagccagccagacatacaaagcacgctttttagtacctcatacacatcatattgcctcaggctgacccaactataatctaaatataaatgatcaatttgccaggtagagcaagtgctttctaattttctgtttatatttgctgtgtctgtctcccgtaactcagaccttttgcactagacagtacttgtgctcaacaaaatcttcccagttgtttcctctctgattgctttgcttgtagttccctgtctccttttcttctttgtttcagagcttctaatcttcatcttggctctgccccagctgtctcaacagagaattcattggtcatctaatcaaacgagagagtagtccccaccccctcagcctctctcctaactagtatggatcttaggagagctatttttgccagcgaaggtaaagtttctgaagcttccttttacccctgctattgccccgttactccatagtcactgtttcaggctgccttggggcaaagctctgagcctgcctccgtggaactgtcagaggaggcaggagacacaatcccacctctcaatgtgcaaatgtggcatttcgaatttgcaataggatgagtaaatttattttctctgagactttaatgagaccatgtgctacaagtacgaagtgttatcagagttgctattatagctgcagcttcaataatgcagaaaaatcagctatgtgccatgagaatttatttcccaagaatacgacaatgatctctgttgttgggaaaggggggattggtccatgtttcctgccatggtaaataactagaagcttggcctgaatggacgccgaaaccgcaggtgtgtactatcaccaaataaaatccctgtcaaactggctttaatttcataggatcagtccccatattttctttaacttctctgccatagcatatatagatgccatttttgttcagttttgtggcttgagcaaataactatcacttttctcgacagtattgagcagaagggggagacagggaagtatgaagtgtgtctgtgaacaggctgtctcatacacacatccagtgagctggaagacacaagggagaaggacgaatccttttcataggaggtgtgtgtcttccaggttgctggcatcatctctgctgcgattgtgatgatcgccattcttgccctggggaagcttctggaacccttgcagaaggtataaccctgcttctctgcataccgattgcataatttcccttcactactctgctaccagataaataacaggagatttaacaatcatcacatggaaaaccattccctgaataacacagccttctctgtctctcttggcagtcggtcttggcagctgttgtaattgccaacctgaaagggatgtttatgcagctgtgtgacattcctcgtctgtggagacagaataagattgatgctgtaagtcacctaccacctatatttatctgaaataagatttggttcttatatgcttcctgccatatcactatattccccccatcccctaagtctcacttgtgctttgggaactccagaggagaaattagaattgtggggataaatcaaagccatgaagtcttccatgtgaactgcattttgtgaagattctgtatctctgggaaggtcaatttccagcaagaatcccatatgaggctcattcatacacctttggccttctaaacacaaaaagcaaaaaaatgtttaaacaccctagtttagaaggacaaacaacatacaaaacaatgcaaaaacaaaatacaaaatgtaaaaacccacgctgactttaactctgactaacataacctttgcaactattctgagaaactaaaaatcagaagctaaatccttcagagttcctctctaatttaaaccataaaaagaatgagaagacttcctacatattgatatggaaaattttccaagacaaatcgttaagtgaaaaagagaccagaatagaaatgctggggaaaagcacagacacaggcagaaataaaagcggatacaaggagggagggaagttgggaatgggtggagaagggggagggttgtgagcaagagttttcccctttttaatgataattcccttatgaaccatacaaatatattagctattcaaaaatttagaaataaataaaatgggacagttggtcttaattgagaagcccagtttctacagctacttaaatataaaatgaatgaagtcacaatatttttaaaaagctgtgatttggccaggcacagtggctcaggcctgtaatcccagcaatttgggaggcaggaggatcacttgagctcaggaatttgagaccagcctgcgtaacacagtgagaccttgtctctactacaaataaaagattaaaaattagccgggtttggtggtatgtacttgtgggtagtcccagctacttgggaggctgaggcgggaggatcacttgaatccagaagatggaggctgcagtgaactatcatggtgccactgcactccagcctgggcaatagagtgtgaccctatctcaaaagaaaaaaaaaaatgtaatttgtttgtggatcattgatcttatttttataggtagttatcacatgatggtacctgatacattaatataattcttttcatttctatttttttccctaggttatctgggtgtttacgtgtatagtgtccatcattctggggctggatctcggtttactagctggccttatatttggactgttgactgtggtcctgagagttcagttgtgagtaacgtaaaacccagatttcctataaacagaacaacacactctgagcttccttataccattttgataaatatagtgaagccactttctttcgttatagttactgtatattgagtgcttctatgcattaagcagacagtgttttacagacatacttaatcttcaaaaatagcctatgaatagttttgattagtctcattctacaggtgagaaaagagaaattcagaaaagctaagaagcatccctaagatcacacagctagtacgtggcagagctaagatttgaacctatgtacctactcatgtcctctactgctgtgctctccttttagttgtggtaagactaaaaagtacatagtttagccaaaggctgaagttgctttgtagtttcttctttaaatgagatgaggaatgtaaggcgctcggccccaggcttgggacaagacagctgttatatattatagttcattttcttttttaaagctagtaaccaaaagttacataacccagaacaggaggactttaaaatagctgatgacagccaaaattcattcaaatctctcatataaccaataaggcatataaccaataaaccacacaattatgtgaaggaaacaattagctcatatgcagagtgaaggcagcaaagacatgatttaaataatggaaaacagcctgtgagggaaggtgaggagcctgaaggtggttttttggttggttttgttttgattctagagaggccttagttaagtgccctcctgggcctagaggggaacagagtctttctctccctcctcaatgtgtccatcgtctttccagacttctggcccctgctctgcctgtgcttgggccgtgaaagaagaagacacctggaaaaacatcaagatagatgtcttcagcttagcatccgctcacctctcctgtcccaccagccagttctccttcctgccctccttccctaccttggcatattggtgcctacccaaaaggcttgtgttttctacctcagcatcctaaatgattgcccaagggcctgagaaggtttgcaggctcccaaagttctcaatttgcttctaggacacgtctcagaaacgctccttagaagatgctgtctctcatgctgtatatgcctcagtgtctattttttcttgtgtggatgtggttggaaaagaagggttttacagagagagattagcttataaacttttaagttaaaaatcagcacaaacctgtaagccaaggaataactggtggcacattttagctgctagtttggtatctaggcttttagccaacaaaaagcagtatcctccacagtatttaatttccagtaattatcatgctgatccagagagcacaatgctgaaagtacactaaacagatactctttcttcaggaattgtatttagcatgtctctagtcacacatgaagagtcacggaatttatctgattgcatcaggaacaagaaatcaatagtctggttgacaggaaggacttatttctggtcctccagtctcctatttctataaaaaatgactaagtcacaaagaagcgccaggcactggaagacccaggggttaaagacagaggctctgctgccctttacctccaggccttttctcacttctcttaagaagtttagttaacaataaaaatcaggataatactgatgacctttcagggttatggcagggcttaaataagatttcacatgcgtgaaagctctatgcttatcctataacgtgttgtgcacgtgcaagtatgatgctcattatttctctcagccatcagaagagaggcacagttctcccctcccctgccgattccacacaaacaccagctgttcatttcagagttagctacaggaaaatgtcatctgcaataaagacagagtccaaaacaccagaatgatgggctctttagtagctgttgtttttaactttttattccaaaatacggctgttccaaaaaatcttgaccttgatattttttcttctagtccttcttggaatggccttggaagcatccctagcacagatatctacaaaagtaccaagaattacaaaaacgtaagtacctttgtgagacatttgctggacttgggtttactagcctgaagtttcagcagctccattttacgtacaaggtagccaaagggagaaaatgcctattgggaaagtctgttagtccacagggagtgtcatgaaaacttttgatccagtgcaccttctgacacccatggcttatgtgaattttgtctatgctagctgaatgtctttttttttttttctttttagatggagtctcactcttcacccaggctggagtgcagaggcaggatctcagctcactgcaacctctgcctcctgggttcaagtgattctcttgtctcagcctccgagtggctgggattacaggcaggtgccaccacgcctggctaatttttgtatttttagtagagatggggttgcaccatgttgcccaggctggtctcaaactcctgagctcaagtgatttgcccgtcttggcctcccaaagagttgggattacaggcgtgagccactgcacctggctagctgaatgtcattttaatataaaactgttgtaagaggaatttaaaaataataggcaatttctagatgttcatccaaaattttgtttatctggtatataattcttatcttctgtaagattttctttattcagttctaacaagagattatcaagttctctatgaccaagaccttattatttgacactttgctttatccttggtattagaagaaataaaatatgacacaggaaatgaaaaacaaagaaattaaacatcccattgatggacttgtgtcacctgcaaataaaattgcttagtggtgactaggggaaacaaagataaaaaagcagagaaagtaaatcaagaaaatacaaatttagcaaataataataataataatatcaaccctaggaagttgtagtctaattttaccttaacattaaaaaaagttggaccttgaaactgggatttcagtagctgctacttaatttatttccgtgatctttctgttatgttgagccaagtgccattaagagctaaaatgatttagagatttttttggctttggggagggagctctaagctgagttagggaattctgacttctaggctccatcttggtgagactttgcccaagtcattcagcctctcaggacctcagttttctcatctgaagcagctagactaaaattgctgattcctgaagactagaaaagtctatgattctgtgattcctgggttctattttgggtgtggccattgtatgtcagggtgagaacagatgatatcataggcctcagttctgcaaatcccattgattttgctttttttctttgctacttttaaagaatgttagcaaaatcaggagggtcagtggtatgaacttcaggcaaatcatggcactgttctaagcctcagtttcttttctggaaatcagagggttgaataaattgctttctaaggccctttctaactttgaccttctatgagactgtagaggtccaagagtttttgtaacctgttgtctccctattcaagaaaagttgtagaggccgggcacggtggttcacacctgtaatcccagcactttgggaggctgaggcgggtgaatcacttgaggtcaggagtttgagaccaacctggccaatgtggcaaaactctgtctctactaaaaatggaaaaattagctgggtgtggtggcagcacctgtaatcccaactacttgggaggctgaggcaggagaatcccttgaacccaggaggtggaggttgcagtgagccgacattgtgccactgtactccagcctgcgcaacagagtgaaactccatctcaaaaaaaaaaaaaaaagaaaagaaagaaaagttgagtgctgctacccagctcctctgagcaactgtgacttgactccttgctaagtagccagaaatgtaattaaatacttgaggcttgaaattatttaatcccagacaatttcttttaatgccagattgaagaacctcaaggagtgaagattcttagattttccagtcctattttctatggcaatgtcgatggttttaaaaaatgtatcaagtccacagtaagtattttatccctagaaatttgttttctaacctcttttgagacttcattcattctacaagtatttactggggtccaatcaggaataggccctagaccctcttccctttgtgtagggcaatgagaattaaaatataacatccttgccttcaaataatttacagtctatttggggattaaaaaaacacatatgttaaaacccaggtagtaataactatgccagacaaaaacattagagatgtttctaggcagaatttgagtaagtttcaaataagtagtatagacagttgagagttcatagaaggaagagatccaggttagttggactaacaggctttgtgcggcagttggctgaaggaaagaaatcatgtcaagtgtttgagaactatgtgagctgagagacagtggaaacatgtattggaggtagggttgcccagttgcagcaaaaagtaaaatatactagtggaataaataagtagaaaatcctggcaccaaatgccatgctatgctttgaacttggagtttgcctctaaatcagtgtttttctaagtgagttccagggcaaactgattcagaggaatgttcacagattttgcaataacaaaagggctctgtgataccaagggaatttggaaaacccagacttaaactaaagagggtattttggggtgtgtgtgtgtttctgttttgtcttttactgtcttggagcctttgatatgctactgtcttctcagagcttctgggtaggagtagggtagcctgggagtagacagagatctactccatcagaccttacaatttcttttttggcaggatagctcaaggaattataccctttgagaaatagcctttccagataacagttgccattaataagctttaggtgccaggcattttaagtaacttgacatttatttccaaaggttggatttgatgccattagagtatataataagaggctgaaagcgctgaggaaaatacagaaactaataaaaagtggacaattaagagcaacaaaggtgagatgacatctttcttttcccccttaaattatttcctttccctgatgagagcagttagagggtctaaaattaaatctatcctctttagtatccagatgtgaatgaacaaatgacatgtacgtatcaaagaacaactgagctattcttataggcaagcgggagtggaagggaatgaaataaaatcagcagcgctgcctggaaacacaggatgtgatttttttccccaccatgaacagtgtctgcattattttctatactttatttttactgaaaggaacaaaataagtgcaaattcaatgccagaaaactacccaccatagaaggcagtctaagtccataaacttttggagctgttaacttttactcagattcttctggccagtgtatttcttggcaaagttccacaatcatccagaaaacaaaagtttcctggctcctctgttctcccagttttcttcctagacaacatcaaagtttgggctgaggtgaaacccatccttaaaaattcatctccttgatgtcttgcttaccaaggaacagtgtgtaggtcttttggataatttgatatgaatggttgaaagatttcaaatctttgacaattaagttgacagtgttttcttcgtttagaatggcatcataagtgatgctgtttcaacaaataatgcttttgagcctgatgaggatattgaagatctggaggaacttgatatcccaaccaaggaaatagagattcaagtggattggaactctgagcttccagtcaaagtgaacgttcccaaagtgccaatccatagccttgtgcttgactgtggagctatatctttcctggacgttgttggagtgagatcactgcgggtggtaaggttctggttttctgaattatacatttggagctttggcaatagtaaaatgatgtgggttgtccagtattgcaacagggcaaatacatgggctttgtaatttttctaggtgaatgcttttgtaaaaaagtgtaatattttaaagcataggctctggagccagactacctgggggagatactggcttcaccacttactagcagtacgaccctgggcaagttgcttaatctgtctatatctcagtttcttcatctgtaatatggaggtaatgatggtatctaccttcacaggttgttacaaggattaaataagctaatagatataaggtgtttagaagagtgtctggttcaggctgggcatggtggctcacgcctgtaatcccagcacttcgggaggctgaggcaggtggatcatgaggtcaggagttcaagaccagcctggccaatatggtgaaaccccgtctctaccaaaaatacaaaaattagctgggcatggtggcgcacacctgtagtcccagctcctaggaggctgtggcaggagaatcgcttgaacccgggaggtggaggttgcagctgagattgtgccactgtactccagcctgggtgacagagtgagacttcatctcaaaaaaaaaaaaaaaaaagaatatctggttcaaagatactccccagcaaattaattcacatttattatgttttatctttctgagaatgtataacaagtggtatatgaaaagaaaaaaatgggcaaaagtttattaagtattacatttctatttgttatgttaacagcaacaggataaggaataccaggtgtatgttaggactggaaaagccaggcattattaagaggttagagtaggaagcaggtcagacatctggaaggtcaaagcaagagttgaggagtatgcaggatagaaacattaatgatatcagaaaccagttatgcaagctgaagttcattaattctgtcaacaaatagatgtgaaatgcctaatgtgtactgagcactctgccaggcacaagagactagtgatgaagtagacacagtttctacctacgtgggacttagcagtctggaggagaaggcaaacattaagtcatcttataaataacaattgtagtaagtgctccaaagaagatgaataggacatcacctgaagcatcaagttcagtgaagcttcaggtaggtatcaaaagggtcaggcagaaaagtaagcaggtcaagacaccaacaatcagatgtaataatataaagctgactcctaactgaggttccacttagctaaggcttctttgctacctctataaggggaggaaatgattccaggatgtgggtactaggtaggtagggtagagaagtgattgtgcttggcaaaagagtatgagaatatgctgacaggttctgttctagttctcttagcagattttgttattagctcatttgaaatcactcttgttctttgttgtacatttcactctaagcattggctgagatccattgtagactatattggccagagagttcaatgaattacttttggggacagtcttaacatatttaatgccagaatatttcccacacaacgaatatttactttcaaatattataatgacagttatgatagctaaagaagactccaaactttatacttgaacagaggtcttgatttgttttcctccataattctcaaattctcttttattattgactatgggtcttgtgtcttgactttttaaaattaaatgtttattttgacataattgtaaattcacatgtagttgtaaggaataatatttagatcctatataccccttacccagtttctcccaatgagtaacatcttgtaaaactgtagcataaaatcacagtaggacactgacattcaaaatagaggccttgacttttaggtcaatagtaacattttgaacccgataagcatagccacacccatatctcttctccaatcagcagggcctatattaagaagcctcctgtactctcttctttccacaaatgcttatttagcacctccacgctatcaagtgctgtgctattgagcgctggatgttgccatctcttgagatataatcctaattataccattactgtagtttgaaaacctccatggttttgcaataataacctttccttaaagtcctgattaaccatgaaagtaataatgtttctcctgagcaagtaactgaatgctactgaattatgggcagataaggttgttaattgttacaaactctccttttttatttttagattgtcaaagaattccaaagaattgatgtgaatgtgtattttgcatcacttcaaggtaaatacatatatctacatatctacctgtaagactttcccgtaagccctttctcctatctgggactgtggtcacattatgtctgaaggccttttttttttttcttttaaagatctcaattgtcattatttgcagttctggaatctggcactgcttcattccataaaacagaataagtgttccaaggaactaagcaggagttcagtattatacacagaaaaggccaaagacagcaaaagcaagcaacaaagagtatattagtccattcaaagttactttcttgtaagtcagagacagtgagacagaacaataggaaaataatggattagttaacatgaggtcatgtcaggatacttttttgtatgaggattattgcagaggaagctttattattatgccaactggaaatttaaactgtcctgttttaggaaatttgctattacctctctctcctgatttcttcaagtatcagataacaatttagtttaggtttgataacttgaaactttagcatgagtgactccattttgatttttagtcttgtctgttgtcgtctagtgcgggagcttagtctaaaacaatggccttttatttttattttttattttactatgtgcctgtgccttgcatgaccccaggatgggcacagctgcttggcccctgagccaccgaaggctgctctactccttcgttctggctactaaaagctgcaaagctctgggagggcaaagctcaagaagactaaaacaatggcctttaccatttttgtttgatgattttccccgttttgatcaggctctcacctaggtaagagtgaacaaaatgtaggagatcagtgctactctgttaccatcattttgggtttctggtctcaggaggtcatgtgtagcttatggtgccctcctcattatcatgtatgtctctgagtttttgttgtttcagagagagaccattcgatgtctgacaggtggctttttggaaacatttaaaactttgagagggtataatgtaccaggaagactgctattatgactatcagggagataataccaagggtttatagtatgctccttagccaggattctcatgaatcaaaccaactaaaattgaatagcctgacaaggagactacctgttttaaccaagaagtcttctctgtagtacctgatgtatttatatatgtggaacaagaagtgtcacccaactgcacagatgcttccttgttgagttagcaggtaatctagcattccatgactggttaaattaaagcagaaagtgtaagttacccaaagaagctactcattgtgaagttttaactacagcactatcctgccaagtgaaagaggtaggcacaagtaagggaaaattaaaagggataagcatcttatgatagggagtcttgttctgacagtcttggagctgtctacagcatgaagttgacaacttcttgttttggtttgtagttttattgtctctagttgtggcatccagcattctggcgaactctctatgtggcccacagtttaagcatgagattcatctcttgaaatttacactgagttgctcagcttcagcttacagagcttcaggaactgagtagttcttggtcttcattggagtgttgtagccagatattagtgaaagctaaaagaattaagaatccagctcagtctacaggtagataataaaaactcataaatattgaacagggctacagtctaagaacagttttactatgcttttcttttgaaccatatgtttttctttctatagtcacctccatttctatcaaagacgatcatggtagaccaatttgtttacaaaataagtttggtctcaaacttggcctgattgattatttacacagtacagcaagaataactacataggtgactcctttcaaatttgctttgccaagcctggcgaggtattgcttgcctgtgagcccagctacttgggaggctgaggtgagaggattgcttgagcccaggaattcaaggctgcagtgcactatgattgtgcctgtgaatagccactgcactatagcctggacaacacagtgagaccatgtctccaaaaaataattgctttgatagaaattttgacaaggaatctcagattggactttttaaaacgtcttgatgctatgaagtcaaaccaaggcagacattaggctttgcctgatgtatctaatatcttgaagttactgggcctcccaggaaggaacgactttttattcactcattgtaaggctagcagcccttgaagccaggaattctgtgcacattttcaaatatgatattctattcaaagccttgataatataaccaatgttttccaattgtattctatttaaaagaacagattctattgaactttcatgtaaataatcatattgccataaaaataagaatactcacaaagagtttccaaattctggaaggatcaggtagagaggaaaagcaaatgtttcaatttttgtttatgaaagtatgcttaacaaggctgggtgcggtggctcacatctgtaatcccagcactttgggaagccaaggcggacaattgctttgagctcagagtttgagaccagcctggcaacatggcaaaacgccgttactacaaaaaatacaaaaaattagctgggcatggagcctgaggctgagaatcacttgagctggggaagtggaggtagcagtgagcccagatggtgccactgcactccaacctgggtgacagagtgagaccctgtctcaaaaaataaaaaaaaagtatgcttaaccaagtggctgtaaactgcagatagctttaaagaaaaattttctttagatctggaaaacaaatattaaaagaaccagcaatgtttcaaataaaaaagccataaaacctgtaattcttctccatcagttcattcagtctcatgtaattaattcttgctctgtttgatcttggctggtagtttaattccaacgaatggtatgaattcaaagttattagaaacctgtatttgtcagagttcttttcattcttcccatataactctttgaagtcacagcactttagaattataatggcttacaaagagctttcagaaaaagtatcagaacaaaacaattaactgtggacaacaagacttaaagtggctatatttaaagatctgatgtgagttacccaattgacaaggatatttggatatttctgtggcacacaacaatttaaaataaccaaaattatgactggtagcatttataccaagacctatcacatttctaggaatgttatataattttggaacatattaataacatatctataaaaatatagcacaaagaaagttaaacatcatttcttattttaacagtgcttcccatataatttaacctatcagataaggccatttggtttaacatctctcttttacagattctttaagaaattccagggtcctctggaacatcccaaagttagttcaaggtcaaaaagacttaattttgatttttgagaagtttgtcaaataccaaaggtttaaaacatttgatcaaaatcggatcataggtcactatgaaataaaaccaaagtgaaaaaagagttcaaaggcaaaaagcacaagaagagttatattgatgaaacatgaaatctctgttttctaggccagttacctggaagagaaaatcctctcacaattttctattaagagtaaaccaatcctctgagaaaactctattgttccaacacataggcccacactttagccttccatcagtgtactttaatattaatgctcaatttttagaaaaacttataaataattcccttctacttttagccaactcaatcacataaaatttttcatgatatttatcttctacaaaccttctacaacttgcttaaaccttcatttggtcctatacttccttttttaaaattggcattgtaccttaggacaaagatttacttttcttttctccttatcattttgaccatataaggttatctcctatacaaaagaaaaaattactctcttttcaattttctttatctcttcatacttgtaaatttcttctcacatctttcctacctagtggttccttcctgccttgttttgatttccttcataagtccatatttagaaacaacctttaaataacctctgattgccaagctagagttaagttttaaataaataaataggccggtcatggcggctcacatctgtaatcccagcactttgggaggcaaaggtcagaggatcacttcaggccaggagtttgagaccagcctgagcaacatggtgagaccccgtctctattattttttttttaaaaaacaaaaagcataaaaactctgagaacattttgaacccagaaagatattacttccaatttgtgccacagagctggtaatgtatggaaatgtgtatcttgacagtgggtgggggtggggtgaatattgacaatggggggatgttgttatgaggagagcaaagctggagattacttagattccttagaacaggaggactctcaagggtgtgagtctctgtgtgtttctttatgaatgtatgtgtgtaggaaagtgctaaggcttaggttgaattctttagcagcagagcccaagatggggattcttgcacaagcgatttattgagaatacatctgaggaaatttatgaagcagtgaggggagcaggatagggaaggggaagaagctgatcaaagacatggtttctgaagtccagcgtagatccctgatttcacagggagcaccaccacaggaagagtaccagaaggttatgcctccttgaggcaagaggacctgctttctcccccagtaatgagtcagtcagtggctgcaggccagccatgtgtggggatgaaacctcccagttctctttatttacttatttatttgagacagggtcttgctctgtcacccaggctggagtgcagtggtgcaactgtggctcactgcagcctcaaactcctgggctcaagtgatcctcccatctcagcctcctgagtagctgagactataggtgcacaaccacacctggctaatttttgtatttttttataaagatggggtttcaccatattgcccagaagttctgggttcaaagtgatctgccctcctcggcctctcaaagtgctggaattacagacccagtcctctttagatgacacagctcccaacgggcaagggaaagtctccagagaagggcacagctgtgaaacattggcagcctggcccacagcagcaggaggatggatacactggcttggccaaagggacgtgatcgtccacaaggttgactacgaccagttatgggataaccattctatatactactggaaaagaaactgtcatttcaaatctgggtcacattttggataagagaaaaataaataaataaaaggaggagctacaaaaacttagtataggttgatgctttaaaatttcttttcttagctgggcatggtagggtgtgccctgtagtcctagctaattgggagggtgaggtggggggatcacttgaacttgggacgcggaggttgcagtgagcaatgatgccactgcactccagcctgggcaatagaatgagactctgtctcaaaaacaaacaaaaatttcttttcctaggaactaacaaaacattgtgtctttcttttgaagattatgtgatagaaaagctggagcaatgcgggttctttgacgacaacattagaaaggacacattctttttgacggtccatgatgctatactctatctacagaaccaagtgaaatctcaagagggtcaaggttccattttagaaacggtaaatattcaacctttctacagatgtatcttttctaaactatcatgatttctataaatggcaaacattacacaagtctagtctagctgttgaattttaagctacctatataacttcatggagcctcagttttttcatcagtaaaatggaagtaaaaacattaaccttgctaggtagatatgaagactaaataagatagtttataggaaattacctggtagtacccagtactgaatagttctacaatgtgtaggtttattaataaaagtgggcattagctataatgccttttaagaatattgaatcttggatcttttgtgatctgggatttgtgtacataaattccacttaaattctcagcaatctggaaaaccttgaattataaatgtctttaaacaggatccaccaggccataagtgatctttgaaaaagaaatttaaaaatcaagccacaaagaagcccagggttaatttttccctacaaaatagaataggccctgatgggaggcctcatggcacaacagtagcgcatctggctccagaataggccctgatttcccatgggtattattttgttaatttttctgtcaaatacccagaagaggtgagcattctggtctggttcattgggcttggcctaatggtgctcctggtggtacaagaatctcatttctcatagtgaatttaggaaactaaagcaaatacctatcaagatataataacagtaatgattccagtgacatcgtggatattttaaattgcttcccatttttctaaaagtagaataagtagatccttattgtagattggcagttgattgaagaaaactaacttaggaaatgatattatattattctttttaggcactggtagtggagagattgttctatttgatgttccttggtaaaatactagtcctaactaccaagctgtggatcttaaatataaaaaaggaaaaaaaaaaaagagtaaagctacaaatctaaagaaaaaaaaactgtttatcattgaaaattcataaactttttctatccaacttaaaattctctaacccataggtgataagaaagttggatcatatgaagtatcctttaagagatccacattaaaagtaaaacagaaccaaggtatcaagttctttctcaacatgaaagcagttattttatttgtttatacccattcttactaagattttaggctatgaatgtcataaaaaccactaaccaagagtgtatctactaggttagactcactcttgtttgcaatcagagaggtattgtgagtggctgggatggatttttttggaccttaaacaaatagactaagcataacggaatgcttgtattacatacttactggtccactaaaagtgggttggacattcctggtggcctgtgagatcaagaggcttatatttctgtgtcttctcagagtctagcacaaagctttatatgtgataagtaggtgaatgatgataaactccttcaagagggagtccctctgtatcaaagatattgtgactgcaatgacacaaccttcttcctatccctttattttaccatcacaggactatctcaggacacaacttgtagttagacttatcctctacctttcccattatgtcataccatttgcacagggacttaaccctctaattcattctcatactagctaagagaattgggctatttgtgagttgaaaagtagctaagtagcatttcaaaatgttattttagcctggatatatatttggagttgctttgaaaatgtccttttccatgcaaaacacaaagccaaaattgtcgttggtttcctctgtgtagaagattaaattacatgccacctctaaacagtagagcttttctgaataaccaacttggtccatagacattggtttccatctccaatagaattaatttccacccaattccatttgtggctgttttttgtcatcagtgacaagctcttcactgtgcattcattgcacactcaacgctgtgctaagtgctcttagcttagccattgagagatgcactattgactgctgaatcatttaggcagagggggtgacttgttaagaggcatacactcaagaggttggggaagagagctgaaaaggagtttacacaatggagaactataccagttcacctttcaatgtgcaaaaaaatgatatacaaaaaattttagttgggaaatataaaagaacaatacagctgaagaggattctgaagtatgtaaagacagatgagaagcaccaggaaagcttcaaatcattttcagtggagcatcaggtgggttgatgctattctatttctaccctgtgttctctttttcaagatcactctcattcaggattgtaaagatacccttgaattaatagaaacagagctgacggaagaagaacttgatgtccaggatgaggtatgatcattttcttctgaagaaaatatttgaattacattttgaataattagagtaatacaaatagtgaatatatctgattaagaactgtcagggaacataattcccccaaatgcagaaaagatggcttcatagcagggaaaaagagaaaataagaattctcccttgaagacattaagtacttggggatcttttgtcccaggcatttggggatgatcagcaactggcaagagccaacacactgctcctgatttgatacctacacctctgcatactgctcttctagagatgtaaggccatggggtaggaaaaaaatgaatagaggaaacttctaagctaggaactttataagcctcaggaatagtatgtgaggaacagaaaccctatgaccttccttcatatgactgataaaggctttaaaaacacactctccccaccctagactgattctgtgtatttcagatgctcttgtgacatcagactattcctaggaaacttgtctgaacttgtagcatctgagtaaattttgcagcttcgccactggataagaggtgaacactgaaggaagatcacagaattgtaaaaagttgaaagatttcttagaatcaagtagtctaacattctagcccatgcagaaatccttcctacaccatccttgatgaatgttcattcagcttttatgtgaacatttccagacattggccactagcggcttctcaagggagtttgttacatggttggaagtctctaaatgttacttgtgcttacagaactcaatttggcctttctgtagtaaccacctagtgaactgagatctgccttccttagcaacacagaccttcccactgaacagcccttcaaatatttgagaatagttctcatgtctccagcagactctcttccagttgagactcttctagttccttctattccttacaaacaagcagtcagtgcttctctggtcacgatggggacacaaaaccctaaatgcggccaggccagcatggagattattcaaccatgacctaccttgatctcatcaagatattcctattactacagcttaaaaatgtgtttcctttcataatagcaacatcagaattttagcttctattgagcaggggccaactaaagactggggcattttcatacaagctatggtctagtagagttccctagttatatttatttaattgagctttgaccctaatacagaactacacctatttctgctggatttcatcttgttggttcttgtttactgacataattttgtattattattagtattattattattattattatttgtgactgagtcttactctgtcacctggactggagtgcagtggtacaatctcagctcactgcaatccctccctcccaggttcaagagattctcacgtgtgcctcagcttcccaagtagttgggattacaggcgctcgccaccacgtccagataattttttttttttgtattcttagtagagacagggttttgccatgttgtccaggctggtcttgaactcctgacctcaagtaatccacctgccttgccctcccagattgctgggattacaggcatgagccaccacattggccagttttgtgttttgaatctaacatccaggatattgtctaccccagtacccgttacctggtgtcataatcaaatctgataagcctgccttctctgcctttttctaggtcttgaaaaaatgttgcaaagaaaacattcaaccccctatagtgaaatcaggcagtaaggatgacaggcagagatttctgtggaggaaatacattgctagagtgaaaatcacagtacctgcatcttggcccaccagcttagtgagcccaggaaagtcattatcgacctgagaagtccttttagctccagtagtttatgactctatggatatagggtgccttagtttgagtaaaaactcatatgtcaacattaaaacttaagactgctatattataggatatttattggttgccacgtaaaataatcattcagggagggtttctatagatggtaaaacaatatagcacaatagtttcaagggcatggactttagaacaagacagacctgggtgctagtcctcattctgctacttactggctgtgcaccccagggcaaattacttatcctgtcttcatattagtatcttcatgtaaagtagtaataataccacagagttgtgaaaattaaaggataaatgtaaagtaacaagagcagtgccttgtacatagtaagtgctcaataaatagtaatcattgctcttaaataaatccaattaaagtgtgatgaatacaggccaggctcagtgactcaagcctgtaatcccagcactttgggaggctgaggcagggggatcacttgaggtcaggagtttgagaccagcctgactaacatggtaaccccccgaccatctctactaaaaaaaaaaaaaaaaaaattagctgggtgtggtggcaggcacctgtaatcccagctactcgggaggctgaggcaggagaattgcttgaacctgggaggcagaggttgcagtgagctgagatcacgccacagcactccagcctgggcaacagtgagtgagattcagtctccaaaaaaaaaaaaaagtataatgaatacgaaatgaagtttttaccctatttctattgtgatgatatacacctaagatgagtagcagtaagcaatcaatactataaaaacatatttataaaaaagataatgcagacttaaggagaattcagttgtatcaacactttgttttccccttgcttccacaggctatgcgtacacttgcatcctgaaagtgggttcgggaggtctctatgagcaaggaatacaagacaaaacttcctcaatgcattgactatttcttcagactcaaaacactcattcttttttctattaagccattgaaagagaagcactaagactgcttctaggctttatttataaaataaacaccttatccctaacatgggcaaaatggctagaattattcagacgatttggcagcgtccagggtaagctggtgttataatacgctgctgatctacatcacagatttgctaataatgttcacgtgggccctggcatatctctgttcagttagagtgagtgctgacccaacagcctctgtggtcaagcgagtcacgaatgattaatcataaagaaaaatcagtttttgactgacctggatatccatgagctgcactgatcaccatgtaaggtcacatttagtaaatgctgaaataaaatgattaatgcatttatcaataaaagcctttgaaaatactttggataataaattggagttttaaaaatgcaaatttgcttagtatctaataatgaagtgttattacatatagccggaattgaggatctctttgatcctggaaatggtttacctaaaagctacagaaccaggccaatatattttgaaatattgatgcagacaaatgaaataataaagagattttcatggtttataaaaatcttttttgatatgataataatcatgatcacaactgagatcaaaaaaatatatgacagattattttgtttaaaaatgcagttttaattatcttagtctatagaaatgatcattgcatggaggcatgtataggtatgatctgtgtaaaatctgacataaaaacagtgctattctgagtgaaaatttttttgatgtgcttacataaccatggtgattaaaatgagtttatattttttctcaaaaattttagcagtgtgtaaagtaagtaatctttaactgaactctgaccacttaaaaaaaaatctaaaaattgaactacctatagtagtctgtgtttaaagtgaatttttaaagacaaagcattctaaatgaactcaatataaaaacattcatttggaatgtacatactgaaaaatacaggtttttttgaccaaaagtttttatatcttttctttttatttatttttttcctaagtgccaacaattttctagatattatatacaacacaggctttgatcttggggacttttcccatatatttcacactggagtgaatgaagttgtacttcatttctagagaaaagttatacccaggtccccaattgagaatgtcttgcttgattgaaaacgacatcatcccttggtatactccagggattggtttcaggacccctgcatttaccaaaatttgtgcacactcaagtcctgcagtcacccctgcctaaagatagaatggcttctctgtttttcttctgaaatacaaccagaaacaatgtgtctatttctgaaagaataggattaatgatcatacaaatgggttaatcctgaattctggttgtaaatctggttacagcataactaggattataatgctgcctcattttcacagcactacttgcttatattgacaacaaatcatctcgctaaagagtgaatgtaggccaggcgcggtggctcatgcctgtaatcccagcactttgggaggccgaggcgggtggatcacgaggtcaggagatcgagaccatcctggctaacatggtaaaaccccgtctctactaaaaatagaaaaaaagaaattagcctagcgtggtggctggcgggcgcctgtagtcccagctatttgggaggctaaggcaggagaatggcgtgaacccgggaggcggagcttgcagtgagccgaggtcgtgccactgcactccagcctgggcgacagagcaagactccgtctcaaaaaaaaaaaaaaaaaaaaaaaaagagtgaatgtaatagtcttgcagaaaatgaatgaatacctttgttcaataaaggaaatatgcactgctcacttttttgaaggaaatgccaaagttacgttttacaacaaggctagagtttgtaaattctgggttcatttgtgatgacataagtcagcaaactgcgggaatactgtctcttctatgtattttgtgaatagtaagcataattttagttttgtattatcaatgaaaatttcacttgaaattaaagctgccttttgttatatttttaacctataggataagattccagtattgtatatgagttttaacaaattaaaaaatcaaatcatgtacatttgaaaatatttgcacacatttaaaaataaatgtaaagttgtcttttaaactactcggatgtgtcctttctgaacaaaa

SEQ ID NO: 8 - protein, 1230 aa, Homo sapiens [sequence omitted]

SEQ ID NO: 9 - protein, 1230 aa, Homo sapiens
MIKTEKSYPERRLRGVLEELSCGCCRFLSLADKDQGHSSRTRLDRERLKSCMRELENMGQQARMLRAQVKRHTVRDKLRLCQNFLQKLRFLADEPQHSIPDIFIWMMSNNKRVAYARVPSKDLLFSIVEEETGKDCAKVKTLFLKLPGKRGFGSAGWTVQAKVELYLWLGLSKQRKEFLCGLPCGFQEVKAAQGLGLHAFPPVSLVYTKKQAFQLRAHMYQARSLFAADSSGLSDPFARVFFINQSQCTEVLNETLCPTWDQMLVFDNLELYGEAHELRDDPPIIVIEIYDQDSMGKADFMGRTFAKPLVKMADEAYCPPRFPPQLEYYQIYRGNATAGDLLAAFELLQIGPAGKADLPPINGPVDVDRGPIMPVPMGIRPVLSKYRVEVLFWGLRDLKRVNLAQVDRPRVDIECAGKGVQSSLIHNYKKNPNFNTLVKWFEVDLPENELLHPPLNIRVVDCRAFGRYTLVGSHAVSSLRRFIYRPPDRSAPSWNTTGEVVVTMEPEVPIKKLETMVKLDATSEAVVKVDVAEEEKEKKKKKKGTAEEPEEEEPDESMLDWWSKYFASIDTMKEQLRQQEPSGIDLEEKEEVDNTEGLKGSMKGKEKARAAKEEKKKKTQSSGSGQGSEAPEKKKPKIDELKVYPKELESEFDNFEDWLHTFNLLRGKTGDDEDGSTEEERIVGRFKGSLCVYKVPLPEDVSREAGYDSTYGMFQGIPSNDPINVLVRVYVVRATDLHPADINGKADPYIAIRLGKTDIRDKENYISKQLNPVFGKSFDIEASFPMESMLTVAVYDWDLVGTDDLIGETKIDLENRFYSKHRATCGIAQTYSTHGYNIWRDPMKPSQILTRLCKDGKVDGPHFGPPGRVKVANRVFTGPSEIEDENGQRKPTDEHVALLALRHWEDIPRAGCRLVPEHVETRPLLNPDKPGIEQGRLELWVDMFPMDMPAPGTPLDISPRKPKKYELRVIIWNTDEVVLEDDDFFTGEKSSDIFVRGWLKGQQEDKQDTDVHYHSLTGEGNFNWRYLFPFDYLAAEEKIVISKKESMFSWDETEYKIPARLTLQIWDADHFSADDFLGAIELDLNRFPRGAKTAKQCTMEMATGEVDVPLVSIFKQKRVKGWWPLLARNENDEFELTGKVEAELHLLTAEEAEKNPVGLARNEPDPLEKPNRPDTAFVWFLNPLKSIKYLICTRYKWLIIKIVLALLGLLMLGLFLYSLPGYMVKKLLGA

SEQ ID NO: 10 - protein, 1307 aa, Homo sapiens
MMTDTQDGPSESSQIMRSLTPLINREEAFGEAGEAGLWPSITHTPDSQEEGLNDIQEMIKTEKSYPERRLRGVLEELSCGCCRFLSLADKDQGHSSRTRLDRERLKSCMRELENMGQQARMLRAQVKRHTVRDKLRLCQNFLQKLRFLADEPQHSIPDIFIWMMSNNKRVAYARVPSKDLLFSIVEEETGKDCAKVKTLFLKLPGKRGFGSAGWTVQAKVELYLWLGLSKQRKEFLCGLPCGFQEVKAAQGLGLHAFPPVSLVYTKKQAFQLRAHMYQARSLFAADSSGLSDPFARVFFINQSQCTEVLNETLCPTWDQMLVFDNLELYGEAHELRDDPPIIVIEIYDQDSMGKADFMGRTFAKPLVKMADEAYCPPRFPPQLEYYQIYRGNATAGDLLAAFELLQIGPAGKADLPPINGPVDVDRGPIMPVPMGIRPVLSKYRVEVLFWGLRDLKRVNLAQVDRPRVDIECAGKGVQSSLIHNYKKNPNFNTLVKWFEVDLPENELLHPPLNIRVVDCRAFGRYTLVGSHAVSSLRRFIYRPPDRSAPSWNTTVRLLRRCRVLCNGGSSSHSTGEVVVTMEPEVPIKKLETMVKLDATSEAVVKVDVAEEEKEKKKKKKGTAEEPEEEEPDESMLDWWSKYFASIDTMKEQLRQQEPSGIDLEEKEEVDNTEGLKGSMKGKEKARAAKEEKKKKTQSSGSGQGSEAPEKKKPKIDELKVYPKELESEFDNFEDWLHTFNLLRGKTGDDEDGSTEEERIVGRFKGSLCVYKVPLPEDVSREAGYDSTYGMFQGIPSNDPINVLVRVYVVRATDLHPADINGKADPYIAIRLGKTDIRDKENYISKQLNPVFGKSFDIEASFPMESMLTVAVYDWDLVGTDDLIGETKIDLENRFYSKHRATCGIAQTYSTHGYNIWRDPMKPSQILTRLCKDGKVDGPHFGPPGRVKVANRVFTGPSEIEDENGQRKPTDEHVALLALRHWEDIPRAGCRLVPEHVETRPLLNPDKPGIEQGRLELWVDMFPMDMPAPGTPLDISPRKPKKYELRVIIWNTDEVVLEDDDFFTGEKSSDIFVRGWLKGQQEDKQDTDVHYHSLTGEGNFNWRYLFPFDYLAAEEKIVISKKESMFSWDETEYKIPARLTLQIWDADHFSADDFLGAIELDLNRFPRGAKTAKQCTMEMATGEVDVPLVSIFKQKRVKGWWPLLARNENDEFELTGKVEAELHLLTAEEAEKNPVGLARNEPDPLEKPNRPDTSFIWFLNPLKSARYFLWHTYRWLLLKLLLLLLLLLLLALFLYSVPGYLVKKILGA

SEQ ID NO: 11 - protein, 1230 aa, Homo sapiens
MIKTEKSYPERRLRGVLEELSCGCCRFLSLADKDQGHSSRTRLDRERLKSCMRELENMGQQARMLRAQVKRHTVRDKLRLCQNFLQKLRFLADEPQHSIPDIFIWMMSNNKRVAYARVPSKDLLFSIVEEETGKDCAKVKTLFLKLPGKRGFGSAGWTVQAKVELYLWLGLSKQRKEFLCGLPCGFQEVKAAQGLGLHAFPPVSLVYTKKQAFQLRAHMYQARSLFAADSSGLSDPFARVFFINQSQCTEVLNETLCPTWDQMLVFDNLELYGEAHELRDDPPIIVIEIYDQDSMGKADFMGRTFAKPLVKMADEAYCPPRFPPQLEYYQIYRGNATAGDLLAAFELLQIGPAGKADLPPINGPVDVDRGPIMPVPMGIRPVLSKYRVEVLFWGLRDLKRVNLAQVDRPRVDIECAGKGVQSSLIHNYKKNPNFNTLVKWFEVDLPENELLHPPLNIRVVDCRAFGRYTLVGSHAVSSLRRFIYRPPDRSAPSWNTTGEVVVTMEPEVPIKKLETMVKLDATSEAVVKVDVAEEEKEKKKKKKGTAEEPEEEEPDESMLDWWSKYFASIDTMKEQLRQQEPSGIDLEEKEEVDNTEGLKGSMKGKEKARAAKEEKKKKTQSSGSGQGSEAPEKKKPKIDELKVYPKELESEFDNFEDWLHTFNLLRGKTGDDEDGSTEEERIVGRFKGSLCVYKVPLPEDVSREAGYDSTYGMFQGIPSNDPINVLVRVYVVRATDLHPADINGKADPYIAIRLGKTDIRDKENYISKQLNPVFGKSFDIEASFPMESMLTVAVYDWDLVGTDDLIGETKIDLENRFYSKHRATCGIAQTYSTHGYNIWRDPMKPSQILTRLCKDGKVDGPHFGPPGRVKVANRVFTGPSEIEDENGQRKPTDEHVALLALRHWEDIPRAGCRLVPEHVETRPLLNPDKPGIEQGRLELWVDMFPMDMPAPGTPLDISPRKPKKYELRVIIWNTDEVVLEDDDFFTGEKSSDIFVRGWLKGQQEDKQDTDVHYHSLTGEGNFNWRYLFPFDYLAAEEKIVISKKESMFSWDETEYKIPARLTLQIWDADHFSADDFLGAIELDLNRFPRGAKTAKQCTMEMATGEVDVPLVSIFKQKRVKGWWPLLARNENDEFELTGKVEAELHLLTAEEAEKNPVGLARNEPDPLEKPNRPDTSFIWFLNPLKSARYFLWHTYRWLLLKLLLLLLLLLLLALFLYSVPGYLVKKILGA

SEQ ID NO: 12 - protein, 1997 aa, Homo sapiens
MALLIHLKTVSELRGRGDRIAKVTFRGQSFYSRVLENCEDVADFDETFRWPVASSIDRNEMLEIQVFNYSKVFSNKLIGTFRMVLQKVVEESHVEVTDTLIDDNNAIIKTSLCVEVRYQATDGTVGSWDDGDFLGDESLQEEEKDSQETDGLLPGSRPSSRPPGEKSFRRAGRSVFSAMKLGKNRSHKEEPQRPDEPAVLEMEDLDHLAIRLGDGLDPDSVSLASVTALTTNVSNKRSKPDIKMEPSAGRPMDYQVSITVIEARQLVGLNMDPVVCVEVGDDKKYTSMKESTNCPYYNEYFVFDFHVSPDVMFDKIIKISVIHSKNLLRSGTLVGSFKMDVGTVYSQPEHQFHHKWAILSDPDDISSGLKGYVKCDVAVVGKGDNIKTPHKANETDEDDIEGNLLLPEGVPPERQWARFYVKIYRAEGLPRMNTSLMANVKKAFIGENKDLVDPYVQVFFAGQKGKTSVQKSSYEPLWNEQVVFTDLFPPLCKRMKVQIRDSDKVNDVAIGTHFIDLRKISNDGDKGFLPTLGPAWVNMYGSTRNYTLLDEHQDLNEGLGEGVSFRARLLLGLAVEIVDTSNPELTSSTEVQVEQATPISESCAGKMEEFFLFGAFLEASMIDRRNGDKPITFEVTIGNYGNEVDGLSRPQRPRPRKEPGDEEEVDLIQNASDDEAGDAGDLASVSSTPPMRPQVTDRNYFHLPYLERKPCIYIKSWWPDQRRRLYNANIMDHIADKLEEGLNDIQEMIKTEKSYPERRLRGVLEELSCGCCRFLSLADKDQGHSSRTRLDRERLKSCMRELENMGQQARMLRAQVKRHTVRDKLRLCQNFLQKLRFLADEPQHSIPDIFIWMMSNNKRVAYARVPSKDLLFSIVEEETGKDCAKVKTLFLKLPGKRGFGSAGWTVQAKVELYLWLGLSKQRKEFLCGLPCGFQEVKAAQGLGLHAFPPVSLVYTKKQAFQLRAHMYQARSLFAADSSGLSDPFARVFFINQSQCTEVLNETLCPTWDQMLVFDNLELYGEAHELRDDPPIIVIEIYDQDSMGKADFMGRTFAKPLVKMADEAYCPPRFPPQLEYYQIYRGNATAGDLLAAFELLQIGPAGKADLPPINGPVDVDRGPIMPVPMGIRPVLSKYRVEVLFWGLRDLKRVNLAQVDRPRVDIECAGKGVQSSLIHNYKKNPNFNTLVKWFEVDLPENELLHPPLNIRVVDCRAFGRYTLVGSHAVSSLRRFIYRPPDRSAPSWNTTVRLLRRCRVLCNGGSSSHSTGEVVVTMEPEVPIKKLETMVKLDATSEAVVKVDVAEEEKEKKKKKKGTAEEPEEEEPDESMLDWWSKYFASIDTMKEQLRQQEPSGIDLEEKEEVDNTEGLKGSMKGKEKARAAKEEKKKKTQSSGSGQGSEAPEKKKPKIDELKVYPKELESEFDNFEDWLHTFNLLRGKTGDDEDGSTEEERIVGRFKGSLCVYKVPLPEDVSREAGYDSTYGMFQGIPSNDPINVLVRVYVVRATDLHPADINGKADPYIAIRLGKTDIRDKENYISKQLNPVFGKSFDIEASFPMESMLTVAVYDWDLVGTDDLIGETKIDLENRFYSKHRATCGIAQTYSTHGYNIWRDPMKPSQILTRLCKDGKVDGPHFGPPGRVKVANRVFTGPSEIEDENGQRKPTDEHVALLALRHWEDIPRAGCRLVPEHVETRPLLNPDKPGIEQGRLELWVDMFPMDMPAPGTPLDISPRKPKKYELRVIIWNTDEVVLEDDDFFTGEKSSDIFVRGWLKGQQEDKQDTDVHYHSLTGEGNFNWRYLFPFDYLAAEEKIVISKKESMFSWDETEYKIPARLTLQIWDADHFSADDFLGAIELDLNRFPRGAKTAKQCTMEMATGEVDVPLVSIFKQKRVKGWWPLLARNENDEFELTGKVEAELHLLTAEEAEKNPVGLARNEPDPLEKPNRPDTAFVWFLNPLKSIKYLICTRYKWLIIKIVLALLGLLMLGLFLYSLPGYMVKKLLGA

SEQ ID NO: 13 - DNA, 3693 bp, Homo sapiens
atgatcaaaacggagaagtcctaccctgagcgtcgcctgcggggcgtcctggaggagctgagctgtggctgctgccgcttcctctccctcgctgacaaggaccagggccactcatcccgcaccaggcttgaccgggagcgcctcaagtcctgcatgagggagctggaaaacatggggcagcaggccaggatgctgcgggcccaggtgaagcggcacacggtgcgggacaagctgaggctgtgccagaacttcctgcagaagctgcgcttcctggcggacgagccccagcacagcattcccgacatcttcatctggatgatgagcaacaacaagcgtgtcgcctatgcccgtgtgccctccaaggacctgctcttctccatcgtggaggaggagactggcaaggactgcgccaaggtcaagacgctcttccttaagctgccagggaagcggggcttcggctcggcaggctggacagtgcaggccaaggtggagctgtacctgtggctgggcctcagcaaacagcgcaaggagttcctgtgcggcctgccctgtggcttccaggaggtcaaggcagcccagggcctgggcctgcatgccttcccacccgtcagcctggtctacaccaagaagcaggcgttccagctccgagcgcacatgtaccaggcccgcagcctctttgccgccgacagcagcggactctcagacccctttgcccgcgtcttcttcatcaatcagagtcagtgcacagaggtgctgaatgagaccctgtgtcccacctgggaccagatgctggtgttcgacaacctggagctctatggtgaagctcatgagctgagggacgatccgcccatcattgtcattgaaatctatgaccaggattccatgggcaaagctgacttcatgggccggaccttcgccaaacccctggtgaagatggcagacgaggcgtactgcccaccccgcttcccacctcagctcgagtactaccagatctaccgtggcaacgccacagctggagacccgctggcggccttcgagctgctgcagattggaccagcagggaaggctgacctgccccccatcaatggcccggtggacgtggaccgaggtcccatcatgcccgtgcccatgggcatccggcccgtgctcagcaagtaccgagtggaggtgctgttctggggcctacgggacctaaagcgggtgaacctggcccaggtggaccggccacgggtggacatcgagtgtgcagggaagggggtgcagtcgtccctgatccacaattataagaagaaccccaacttcaacaccctcgtcaagtggtttgaagtggacctcccagagaacgagctgctgcacccgcccttgaacatccgtgtggtggactgccgggccttcggtcgctacacactggtgggctcccatgccgtcagctccctgcgacgcttcatctaccggcccccagaccgctcggcccccagctggaacaccacgggggaggttgtggtgactatggagccagaggtacccatcaagaaactggagaccatggtgaagctggacgcgacttctgaagctgttgtcaaggtggatgtggctgaggaggagaaggagaagaagaagaagaagaagggcactgcggaggagccagaggaggaggagccagacgagagcatgctggactggtggtccaagtactttgcctccattgacaccatgaaggagcaacttcgacaacaagagccctctggaattgacttggaggagaaggaggaagtggacaataccgagggcctgaaggggtcaatgaagggcaaggagaaggcaagggctgccaaagaggagaagaagaagaaaactcagagctctggctctggccaggggtccgaggcccccgagaagaagaaacccaagattgatgagcttaaggtataccccaaagagctggagtccgagtttgataactttgaggactggctgcacactttcaacttgcttcggggcaagaccggggatgatgaggatggctccaccgaggaggagcgcattgtgggacgcttcaagggctccctctgcgtgtacaaagtgccactcccagaggacgtgtcccgggaagccggctacgactccacctacggcatgttccagggcatcccgagcaatgaccccatcaatgtgctggtccgagtctatgtggtccgggccacggacctgcaccctgctgacatcaacggcaaagctgacccctacatcgccatccggctaggcaagactgacatccgcgacaaggagaactacatctccaagcagctcaaccctgtctttgggaagtcctttgacatcgaggcctccttccccatggaatccatgctgacggtggctgtgtatgactgggacctggtgggcactgatgacctcattggggaaaccaagatcgacctggagaaccgcttctacagcaagcaccgcgccacctgcggcatcgcccagacctactccacacatggctacaatatctggcgggaccccatgaagcccagccagatcctgacccgcctctgcaaagacggcaaagtggacggcccccactttgggccccctgggagagtgaaggtggccaaccgcgtcttcactgggccctctgagattgaggacgagaacggtcagaggaagcccacagacgagcatgtggcgctgttggccctgaggcactgggaggacatcccccgcgcaggctgccgcctggtgccagagcatgtggagacgaggccgctgctcaaccccgacaagccgggcatcgagcagggccgcctggagctgtgggtggacatgttccccatggacatgccagcccctgggacgcctctggacatctcacctcggaagcccaagaagtacgagctgcgggtcatcatctggaacacagatgaggtggtcttggaggacgacgacttcttcacaggggagaagtccagtgacatcttcgtgagggggtggctgaagggccagcaggaggacaagcaggacacagacgtccactaccactccctcactggcgagggcaacttcaactggcgctacctgttccccttcgactacctggcggcggaggagaagatcgtcatctccaagaaggagtccatgttctcctgggacgagaccgagtacaagatccccgcgcggctcaccctgcagatctgggatgcggaccacttctccgctgacgacttcctgggggccatcgagctggacctgaaccggttcccgcggggcgcaaagacagccaagcagtgcaccatggagatggccaccggggaggtggacgtgcccctcgtgtccatcttcaagcaaaagcgcgtcaaaggctggtggcccctcctggcccgcaatgagaacgatgagtttgagctcacgggcaaggtggaggctgagctgcatttactgacagcagaggaggcagagaagaacccagtgggcctggcccgcaatgaacctgaccccctagagaaacccaaccggcccgacacgagcttcatctggttcctgaaccctctcaagtcggctcgctacttcttgtggcacacgtatcgctggctgctcctcaaactgttgctgctcctgctgctgctcctcctcctcgccctgttcctctactctgtgcctggctacctggtcaagaaaatcctcggggcctga

SEQ ID NO: 14 - DNA, 5994 bp, Homo sapiens
atggccttgctcatccacctcaagacagtctcggagctgcggggcaggggcgaccggatcgccaaagtgactttccgagggcaatccttctactctcgggtcctggagaactgtgaggatgtggctgactttgatgagacatttcggtggccggtggccagcagcatcgacagaaatgagatgctggagattcaggttttcaactacagcaaagtcttcagcaacaagctcatcgggaccttccgcatggtgctgcagaaggtggtagaggagagccatgtggaggtgactgacacgctgattgatgacaacaatgctatcatcaagaccagcctgtgcgtggaggtccggtatcaggccactgacggcacagtgggctcctgggacgatggggacttcctgggagatgagtctcttcaagaggaagagaaggacagccaagagacggatggactgctcccaggctcccggcccagctcccggcccccaggagagaagagcttccggagagccgggaggagcgtgttctccgccatgaagctcggcaaaaaccggtctcacaaggaggagccccaaagaccagatgaaccggcggtgctggagatggaagaccttgaccatctggccattcggctaggagatggactggatcccgactcggtgtctctagcctcagtcacagctctcaccactaatgtctccaacaagcgatctaagccagacattaagatggagccaagtgctgggcggcccatggattaccaggtcagcatcacggtgatcgaggcccggcagctggtgggcttgaacatggaccctgtggtgtgcgtggaggtgggtgacgacaagaagtacacatccatgaaggagtccactaactgcccctattacaacgagtacttcgtcttcgacttccatgtctctccggatgtcatgtttgacaagatcatcaagatttcggtgattcactccaagaacctgctgcgcagtggcaccctggtgggctccttcaaaatggacgtgggaaccgtgtactcgcagccagagcaccagttccatcacaagtgggccatcctgtctgaccccgatgacatctcctcggggctgaagggctacgtgaagtgtgacgttgccgtggtgggcaaaggggacaacatcaagacgccccacaaggccaatgagaccgacgaagatgacattgaggggaacttgctgctccccgagggggtgccccccgaacgccagtgggcccggttctatgtgaaaatttaccgagcagaggggctgccccgtatgaacacaagcctcatggccaatgtaaagaaggctttcatcggtgaaaacaaggacctcgtggacccctacgtgcaagtcttctttgctggccagaagggcaagacttcagtgcagaagagcagctatgagcccctgtggaatgagcaggtcgtctttacagacctcttccccccactctgcaaacgcatgaaggtgcagatccgagactcggacaaggtcaacgacgtggccatcggcacccacttcattgacctgcgcaagatttctaatgacggagacaaaggcttcctgcccacactgggcccagcctgggtgaacatgtacggctccacacgtaactacacgctgctggatgagcatcaggacctgaacgagggcctgggggagggtgtgtccttccgggcccggctcctgctgggcctggctgtggagatcgtagacacctccaaccctgagctcaccagctccacagaggtgcaggtggagcaggccacgcccatctcggagagctgtgcaggtaaaatggaagaattctttctctttggagccttcctggaggcctcaatgatcgaccggagaaacggagacaagcccatcacctttgaggtcaccataggcaactatgggaacgaagttgatggcctgtcccggccccagcggcctcggccccggaaggagccgggggatgaggaagaagtagacctgattcagaacgcaagtgatgacgaggccggtgatgccggggacctggcctcagtctcctccactccaccaatgcggccccaggtcaccgacaggaactacttccatctgccctacctggagcgaaagccctgcatctacatcaagagctggtggccggaccagcgccgccgcctctacaatgccaacatcatggaccacattgccgacaagctggaagaaggcctgaacgacatacaggagatgatcaaaacggagaagtcctaccctgagcgtcgcctgcggggcgtcctggaggagctgagctgtggctgctgccgcttcctctccctcgctgacaaggaccagggccactcatcccgcaccaggcttgaccgggagcgcctcaagtcctgcatgagggagctggaaaacatggggcagcaggccaggatgctgcgggcccaggtgaagcggcacacggtgcgggacaagctgaggctgtgccagaacttcctgcagaagctgcgcttcctggcggacgagccccagcacagcattcccgacatcttcatctggatgatgagcaacaacaagcgtgtcgcctatgcccgtgtgccctccaaggacctgctcttctccatcgtggaggaggagactggcaaggactgcgccaaggtcaagacgctcttccttaagctgccagggaagcggggcttcggctcggcaggctggacagtgcaggccaaggtggagctgtacctgtggctgggcctcagcaaacagcgcaaggagttcctgtgcggcctgccctgtggcttccaggaggtcaaggcagcccagggcctgggcctgcatgccttcccacccgtcagcctggtctacaccaagaagcaggcgttccagctccgagcgcacatgtaccaggcccgcagcctctttgccgccgacagcagcggactctcagacccctttgcccgcgtcttcttcatcaatcagagtcagtgcacagaggtgctgaatgagaccctgtgtcccacctgggaccagatgctggtgttcgacaacctggagctctatggtgaagctcatgagctgagggacgatccgcccatcattgtcattgaaatctatgaccaggattccatgggcaaagctgacttcatgggccggaccttcgccaaacccctggtgaagatggcagacgaggcgtactgcccaccccgcttcccacctcagctcgagtactaccagatctaccgtggcaacgccacagctggagacctgctggcggccttcgagctgctgcagattggaccagcagggaaggctgacctgccccccatcaatggcccggtggacgtggaccgaggtcccatcatgcccgtgcccatgggcatccggcccgtgctcagcaagtaccgagtggaggtgctgttctggggcctacgggacctaaagcgggtgaacctggcccaggtggaccggccacgggtggacatcgagtgtgcagggaagggggtgcagtcgtccctgatccacaattataagaagaaccccaacttcaacaccctcgtcaagtggtttgaagtggacctcccagagaacgagctgctgcacccgcccttgaacatccgtgtggtggactgccgggccttcggtcgctacacactggtgggctcccatgccgtcagctccctgcgacgcttcatctaccggcccccagaccgctcggcccccagctggaacaccacggtcaggcttctccggcgctgccgtgtgctgtgcaatgggggctcctcctctcactccacaggggaggttgtggtgactatggagccagaggtacccatcaagaaactggagaccatggtgaagctggacgcgacttctgaagctgttgtcaaggtggatgtggctgaggaggagaaggagaagaagaagaagaagaagggcactgcggaggagccagaggaggaggagccagacgagagcatgctggactggtggtccaagtactttgcctccattgacaccatgaaggagcaacttcgacaacaagagccctctggaattgacttggaggagaaggaggaagtggacaataccgagggcctgaaggggtcaatgaagggcaaggagaaggcaagggctgccaaagaggagaagaagaagaaaactcagagctctggctctggccaggggtccgaggcccccgagaagaagaaacccaagattgatgagcttaaggtataccccaaagagctggagtccgagtttgataactttgaggactggctgcacactttcaacttgcttcggggcaagaccggggatgatgaggatggctccaccgaggaggagcgcattgtgggacgcttcaagggctccctctgcgtgtacaaagtgccactcccagaggacgtgtcccgggaagccggctacgactccacctacggcatgttccagggcatcccgagcaatgaccccatcaatgtgctggtccgagtctatgtggtccgggccacggacctgcaccctgctgacatcaacggcaaagctgacccctacatcgccatccggctaggcaagactgacatccgcgacaaggagaactacatctccaagcagctcaaccctgtctttgggaagtcctttgacatcgaggcctccttccccatggaatccatgctgacggtggctgtgtatgactgggacctggtgggcactgatgacctcattggggaaaccaagatcgacctggagaaccgcttctacagcaagcaccgcgccacctgcggcatcgcccagacctactccacacatggctacaatatctggcgggaccccatgaagcccagccagatcctgacccgcctctgcaaagacggcaaagtggacggcccccactttgggccccctgggagagtgaaggtggccaaccgcgtcttcactgggccctctgagattgaggacgagaacggtcagaggaagcccacagacgagcatgtggcgctgttggccctgaggcactgggaggacatcccccgcgcaggctgccgcctggtgccagagcatgtggagacgaggccgctgctcaaccccgacaagccgggcatcgagcagggccgcctggagctgtgggtggacatgttccccatggacatgccagcccctgggacgcctctggacatctcacctcggaagcccaagaagtacgagctgcgggtcatcatctggaacacagatgaggtggtcttggaggacgacgacttcttcacaggggagaagtccagtgacatcttcgtgagggggtggctgaagggccagcaggaggacaagcaggacacagacgtccactaccactccctcactggcgagggcaacttcaactggcgctacctgttccccttcgactacctggcggcggaggagaagatcgtcatctccaagaaggagtccatgttctcctgggacgagaccgagtacaagatccccgcgcggctcaccctgcagatctgggatgcggaccacttctccgctgacgacttcctgggggccatcgagctggacctgaaccggttcccgcggggcgcaaagacagccaagcagtgcaccatggagatggccaccggggaggtggacgtgcccctcgtgtccatcttcaagcaaaagcgcgtcaaaggctggtggcccctcctggcccgcaatgagaacgatgagtttgagctcacgggcaaggtggaggctgagctgcatttactgacagcagaggaggcagagaagaacccagtgggcctggcccgcaatgaacctgaccccctagagaaacccaaccggcccgacacgagcttcatctggttcctgaaccctctcaagtcggctcgctacttcttgtggcacacgtatcgctggctgctcctcaaactgttgctgctcctgctgctgctcctcctcctcgccctgttcctctactctgtgcctggctacctggtcaagaaaatcctcggggcctga

SEQ ID NO: 15 - DNA, 3693 bp, Homo sapiens
atgatcaaaacggagaagtcctaccctgagcgtcgcctgcggggcgtcctggaggagctgagctgtggctgctgccgcttcctctccctcgctgacaaggaccagggccactcatcccgcaccaggcttgaccgggagcgcctcaagtcctgcatgagggagctggaaaacatggggcagcaggccaggatgctgcgggcccaggtgaagcggcacacggtgcgggacaagctgaggctgtgccagaacttcctgcagaagctgcgcttcctggcggacgagccccagcacagcattcccgacatcttcatctggatgatgagcaacaacaagcgtgtcgcctatgcccgtgtgccctccaaggacctgctcttctccatcgtggaggaggagactggcaaggactgcgccaaggtcaagacgctcttccttaagctgccagggaagcggggcttcggctcggcaggctggacagtgcaggccaaggtggagctgtacctgtggctgggcctcagcaaacagcgcaaggagttcctgtgcggcctgccctgtggcttccaggaggtcaaggcagcccagggcctgggcctgcatgccttcccacccgtcagcctggtctacaccaagaagcaggcgttccagctccgagcgcacatgtaccaggcccgcagcctctttgccgccgacagcagcggactctcagacccctttgcccgcgtcttcttcatcaatcagagtcagtgcacagaggtgctgaatgagaccctgtgtcccacctgggaccagatgctggtgttcgacaacctggagctctatggtgaagctcatgagctgagggacgatccgcccatcattgtcattgaaatctatgaccaggattccatgggcaaagctgacttcatgggccggaccttcgccaaacccctggtgaagatggcagacgaggcgtactgcccaccccgcttcccacctcagctcgagtactaccagatctaccgtggcaacgccacagctggagacctgctggcggccttcgagctgctgcagattggaccagcagggaaggctgacctgccccccatcaatggcccggtggacgtggaccgaggtcccatcatgcccgtgcccatgggcatccggcccgtgctcagcaagtaccgagtggaggtgctgttctggggcctacgggacctaaagcgggtgaacctggcccaggtggaccggccacgggtggacatcgagtgtgcagggaagggggtgcagtcgtccctgatccacaattataagaagaaccccaacttcaacaccctcgtcaagtggtttgaagtggacctcccagagaacgagctgctgcacccgcccttgaacatccgtgtggtggactgccgggccttcggtcgctacacactggtgggctcccatgccgtcagctccctgcgacgcttcatctaccggcccccagaccgctcggcccccagctggaacaccacgggggaggttgtggtgactatggagccagaggtacccatcaagaaactggagaccatggtgaagctggacgcgacttctgaagctgttgtcaaggtggatgtggctgaggaggagaaggagaagaagaagaagaagaagggcactgcggaggagccagaggaggaggagccagacgagagcatgctggactggtggtccaagtactttgcctccattgacaccatgaaggagcaacttcgacaacaagagccctctggaattgacttggaggagaaggaggaagtggacaataccgagggcctgaaggggtcaatgaagggcaaggagaaggcaagggctgccaaagaggagaagaagaagaaaactcagagctctggctctggccaggggtccgaggcccccgagaagaagaaacccaagattgatgagcttaaggtataccccaaagagctggagtccgagtttgataactttgaggactggctgcacactttcaacttgcttcggggcaagaccggggatgatgaggatggctccaccgaggaggagcgcattgtgggacgcttcaagggctccctctgcgtgtacaaagtgccactcccagaggacgtgtcccgggaagccggctacgactccacctacggcatgttccagggcatcccgagcaatgaccccatcaatgtgctggtccgagtctatgtggtccgggccacggacctgcaccctgctgacatcaacggcaaagctgacccctacatcgccatccggctaggcaagactgacatccgcgacaaggagaactacatctccaagcagctcaaccctgtctttgggaagtcctttgacatcgaggcctccttccccatggaatccatgctgacggtggctgtgtatgactgggacctggtgggcactgatgacctcattggggaaaccaagatcgacctggagaaccgcttctacagcaagcaccgcgccacctgcggcatcgcccagacctactccacacatggctacaatatctggcgggaccccatgaagcccagccagatcctgacccgcctctgcaaagacggcaaagtggacggcccccactttgggccccctgggagagtgaaggtggccaaccgcgtcttcactgggccctctgagattgaggacgagaacggtcagaggaagcccacagacgagcatgtggcgctgttggccctgaggcactgggaggacatcccccgcgcaggctgccgcctggtgccagagcatgtggagacgaggccgctgctcaaccccgacaagccgggcatcgagcagggccgcctggagctgtgggtggacatgttccccatggacatgccagcccctgggacgcctctggacatctcacctcggaagcccaagaagtacgagctgcgggtcatcatctggaacacagatgaggtggtcttggaggacgacgacttcttcacaggggagaagtccagtgacatcttcgtgagggggtggctgaagggccagcaggaggacaagcaggacacagacgtccactaccactccctcactggcgagggcaacttcaactggcgctacctgttccccttcgactacctggcggcggaggagaagatcgtcatctccaagaaggagtccatgttctcctgggacgagaccgagtacaagatccccgcgcggctcaccctgcagatctgggatgcggaccacttctccgctgacgacttcctgggggccatcgagctggacctgaaccggttcccgcggggcgcaaagacagccaagcagtgcaccatggagatggccaccggggaggtggacgtgcccctcgtgtccatcttcaagcaaaagcgcgtcaaaggctggtggcccctcctggcccgcaatgagaacgatgagtttgagctcacgggcaaggtggaggctgagctgcatttactgacagcagaggaggcagagaagaacccagtgggcctggcccgcaatgaacctgaccccctagagaaacccaaccggcccgacacgagcttcatctggttcctgaaccctctcaagtcggctcgctacttcttgtggcacacgtatcgctggctgctcctcaaactgttgctgctcctgctgctgctcctcctcctcgccctgttcctctactctgtgcctggctacctggtcaagaaaatcctcggggcctga

SEQ ID NO: 16 - DNA, 3924 bp, Homo sapiens
atgatgaccgatactcaggatggccctagcgagagctcccagatcatgaggtccctcactcccctgatcaacagggaggaggcatttggggaggctggggaggcggggctgtggcccagcatcacccacactcctgattcacaggaagaaggcctgaacgacatacaggagatgatcaaaacggagaagtcctaccctgagcgtcgcctgcggggcgtcctggaggagctgagctgtggctgctgccgcttcctctccctcgctgacaaggaccagggccactcatcccgcaccaggcttgaccgggagcgcctcaagtcctgcatgagggagctggaaaacatggggcagcaggccaggatgctgcgggcccaggtgaagcggcacacggtgcgggacaagctgaggctgtgccagaacttcctgcagaagctgcgcttcctggcggacgagccccagcacagcattcccgacatcttcatctggatgatgagcaacaacaagcgtgtcgcctatgcccgtgtgccctccaaggacctgctcttctccatcgtggaggaggagactggcaaggactgcgccaaggtcaagacgctcttccttaagctgccagggaagcggggcttcggctcggcaggctggacagtgcaggccaaggtggagctgtacctgtggctgggcctcagcaaacagcgcaaggagttcctgtgcggcctgccctgtggcttccaggaggtcaaggcagcccagggcctgggcctgcatgccttcccacccgtcagcctggtctacaccaagaagcaggcgttccagctccgagcgcacatgtaccaggcccgcagcctctttgccgccgacagcagcggactctcagacccctttgcccgcgtcttcttcatcaatcagagtcagtgcacagaggtgctgaatgagaccctgtgtcccacctgggaccagatgctggtgttcgacaacctggagctctatggtgaagctcatgagctgagggacgatccgcccatcattgtcattgaaatctatgaccaggattccatgggcaaagctgacttcatgggccggaccttcgccaaacccctggtgaagatggcagacgaggcgtactgcccaccccgcttcccacctcagctcgagtactaccagatctaccgtggcaacgccacagctggagacctgctggcggccttcgagctgctgcagattggaccagcagggaaggctgacctgccccccatcaatggcccggtggacgtggaccgaggtcccatcatgcccgtgcccatgggcatccggcccgtgctcagcaagtaccgagtggaggtgctgttctggggcctacgggacctaaagcgggtgaacctggcccaggtggaccggccacgggtggacatcgagtgtgcagggaagggggtgcagtcgtccctgatccacaattataagaagaaccccaacttcaacaccctcgtcaagtggtttgaagtggacctcccagagaacgagctgctgcacccgcccttgaacatccgtgtggtggactgccgggccttcggtcgctacacactggtgggctcccatgccgtcagctccctgcgacgcttcatctaccggcccccagaccgctcggcccccagctggaacaccacggtcaggcttctccggcgctgccgtgtgctgtgcaatgggggctcctcctctcactccacaggggaggttgtggtgactatggagccagaggtacccatcaagaaactggagaccatggtgaagctggacgcgacttctgaagctgttgtcaaggtggatgtggctgaggaggagaaggagaagaagaagaagaagaagggcactgcggaggagccagaggaggaggagccagacgagagcatgctggactggtggtccaagtactttgcctccattgacaccatgaaggagcaacttcgacaacaagagccctctggaattgacttggaggagaaggaggaagtggacaataccgagggcctgaaggggtcaatgaagggcaaggagaaggcaagggctgccaaagaggagaagaagaagaaaactcagagctctggctctggccaggggtccgaggcccccgagaagaagaaacccaagattgatgagcttaaggtataccccaaagagctggagtccgagtttgataactttgaggactggctgcacactttcaacttgcttcggggcaagaccggggatgatgaggatggctccaccgaggaggagcgcattgtgggacgcttcaagggctccctctgcgtgtacaaagtgccactcccagaggacgtgtcccgggaagccggctacgactccacctacggcatgttccagggcatcccgagcaatgaccccatcaatgtgctggtccgagtctatgtggtccgggccacggacctgcaccctgctgacatcaacggcaaagctgacccctacatcgccatccggctaggcaagactgacatccgcgacaaggagaactacatctccaagcagctcaaccctgtctttgggaagtcctttgacatcgaggcctccttccccatggaatccatgctgacggtggctgtgtatgactgggacctggtgggcactgatgacctcattggggaaaccaagatcgacctggagaaccgcttctacagcaagcaccgcgccacctgcggcatcgcccagacctactccacacatggctacaatatctggcgggaccccatgaagcccagccagatcctgacccgcctctgcaaagacggcaaagtggacggcccccactttgggccccctgggagagtgaaggtggccaaccgcgtcttcactgggccctctgagattgaggacgagaacggtcagaggaagcccacagacgagcatgtggcgctgttggccctgaggcactgggaggacatcccccgcgcaggctgccgcctggtgccagagcatgtggagacgaggccgctgctcaaccccgacaagccgggcatcgagcagggccgcctggagctgtgggtggacatgttccccatggacatgccagcccctgggacgcctctggacatctcacctcggaagcccaagaagtacgagctgcgggtcatcatctggaacacagatgaggtggtcttggaggacgacgacttcttcacaggggagaagtccagtgacatcttcgtgagggggtggctgaagggccagcaggaggacaagcaggacacagacgtccactaccactccctcactggcgagggcaacttcaactggcgctacctgttccccttcgactacctggcggcggaggagaagatcgtcatctccaagaaggagtccatgttctcctgggacgagaccgagtacaagatccccgcgcggctcaccctgcagatctgggatgcggaccacttctccgctgacgacttcctgggggccatcgagctggacctgaaccggttcccgcggggcgcaaagacagccaagcagtgcaccatggagatggccaccggggaggtggacgtgcccctcgtgtccatcttcaagcaaaagcgcgtcaaaggctggtggcccctcctggcccgcaatgagaacgatgagtttgagctcacgggcaaggtggaggctgagctgcatttactgacagcagaggaggcagagaagaacccagtgggcctggcccgcaatgaacctgaccccctagagaaacccaaccggcccgacacgagcttcatctggttcctgaaccctctcaagtcggctcgctacttcttgtggcacacgtatcgctggctgctcctcaaactgttgctgctcctgctgctgctcctcctcctcgccctgttcctctactctgtgcctggctacctggtcaagaaaatcctcggggcctga

SEQ ID NO: 17 - DNA, 3453 bp, Homo sapiens
atgatcaaaacggagaagtcctaccctgagcgtcgcctgcggggcgtcctggaggagctgagctgtggctgctgccgcttcctctccctcgctgacaaggaccagggccactcatcccgcaccaggcttgaccgggagcgcctcaagtcctgcatgagggagctggaaaacatggggcagcaggccaggatgctgcgggcccaggtgaagcggcacacggtgcgggacaagctgaggctgtgccagaacttcctgcagaagctgcgcttcctggcggacgagccccagcacagcattcccgacatcttcatctggatgatgagcaacaacaagcgtgtcgcctatgcccgtgtgccctccaaggacctgctcttctccatcgtggaggaggagactggcaaggactgcgccaaggtcaagacgctcttccttaagctgccagggaagcggggcttcggctcggcaggctggacagtgcaggccaaggtggagctgtacctgtggctgggcctcagcaaacagcgcaaggagttcctgtgcggcctgccctgtggcttccaggaggtcaaggcagcccagggcctgggcctgcatgccttcccacccgtcagcctggtctacaccaagaagcaggcgttccagctccgagcgcacatgtaccaggcccgcagcctctttgccgccgacagcagcggactctcagacccctttgcccgcgtcttcttcatcaatcagagtcagtgcacagaggtgctgaatgagaccctgtgtcccacctgggaccagatgctggtgttcgacaacctggagctctatggtgaagctcatgagctgagggacgatccgcccatcattgtcattgaaatctatgaccaggattccatgggcaaagctgacttcatgggccggaccttcgccaaacccctggtgaagatggcagacgaggcgtactgcccaccccgcttcccacctcagctcgagtactaccagatctaccgtggcaacgccacagctggagacctgctggcggccttcgagctgctgcagattggaccagcagggaaggctgacctgccccccatcaatggcccggtggacgtggaccgaggtcccatcatgcccgtgcccatgggcatccggcccgtgctcagcaagtaccgagtggaggtgctgttctggggcctacgggacctaaagcgggtgaacctggcccaggtggaccggccacgggtggacatcgagtgtgcagggaagggggtgcagtcgtccctgatccacaattataagaagaaccccaacttcaacaccctcgtcaagtggtttgaagtggacctcccagagaacgagctgctgcacccgcccttgaacatccgtgtggtggactgccgggccttcggtcgctacacactggtgggctcccatgccgtcagctccctgcgacgcttcatctaccggcccccagaccgctcggcccccagctggaacaccacgggggaggttgtggtgactatggagccagaggtacccatcaagaaactggagaccatggtgaagctggacgcgacttctgaagctgttgtcaaggtggatgtggctgaggaggagaaggagaagaagaagaagaagaagggcactgcggaggagccagaggaggaggagccagacgagagcatgctggactggtggtccaagtactttgcctccattgacaccatgaaggagcaacttcgacaacaagagccctctggaattgacttggaggagaaggaggaagtggacaataccgagggcctgaaggggtcaatgaagggcaaggagaaggcaagggctgccaaagaggagaagaagaagaaaactcagagctctggctctggccaggggtccgaggcccccgagaagaagaaacccaagattgatgagcttaaggtataccccaaagagctggagtccgagtttgataactttgaggactggctgcacactttcaacttgcttcggggcaagaccggggatgatgaggatggctccaccgaggaggagcgcattgtgggacgcttcaagggctccctctgcgtgtacaaagtgccactcccagaggacgtgtcccgggaagccggctacgactccacctacggcatgttccagggcatcccgagcaatgaccccatcaatgtgctggtccgagtctatgtggtccgggccacggacctgcaccctgctgacatcaacggcaaagctgacccctacatcgccatccggctaggcaagactgacatccgcgacaaggagaactacatctccaagcagctcaaccctgtctttgggaagtcctttgacatcgaggcctccttccccatggaatccatgctgacggtggctgtgtatgactgggacctggtgggcactgatgacctcattggggaaaccaagatcgacctggagaaccgcttctacagcaagcaccgcgccacctgcggcatcgcccagacctactccacacatggctacaatatctggcgggaccccatgaagcccagccagatcctgacccgcctctgcaaagacggcaaagtggacggcccccactttgggccccctgggagagtgaaggtggccaaccgcgtcttcactgggccctctgagattgaggacgagaacggtcagaggaagcccacagacgagcatgtggcgctgttggccctgaggcactgggaggacatcccccgcgcaggctgccgcctggtgccagagcatgtggagacgaggccgctgctcaaccccgacaagccgggcatcgagcagggccgcctggagctgtgggtggacatgttccccatggacatgccagcccctgggacgcctctggacatctcacctcggaagcccaagaagtacgagctgcgggtcatcatctggaacacagatgaggtggtcttggaggacgacgacttcttcacaggggagaagtccagtgacatcttcgtgagggggtggctgaagggccagcaggaggacaagcaggacacagacgtccactaccactccctcactggcgagggcaacttcaactggcgctacctgttccccttcgactacctggcggcggaggagaagatcgtcatctccaagaaggacctggcccgcaatgagaacgatgagtttgagctcacgggcaaggtggaggctgagctgcatttactgacagcagaggaggcagagaagaacccagtgggcctggcccgcaatgaacctgaccccctagagaaacccaaccggcccgacacggccttcgtctggttcctcaaccctctcaagtccatcaagtacctcatctgcacccggtacaagtggctcatcatcaagatcgtgctggcgctgttggggctgctcatgttggggctcttcctctacagcctccctggctacatggtcaaaaagctccttggggcatga

SEQ ID NO: 18 - DNA, 5994 bp, Homo sapiens
atggccttgctcatccacctcaagacagtctcggagctgcggggcaggggcgaccggatcgccaaagtgactttccgagggcaatccttctactctcgggtcctggagaactgtgaggatgtggctgactttgatgagacatttcggtggccggtggccagcagcatcgacagaaatgagatgctggagattcaggttttcaactacagcaaagtcttcagcaacaagctcatcgggaccttccgcatggtgctgcagaaggtggtagaggagagccatgtggaggtgactgacacgctgattgatgacaacaatgctatcatcaagaccagcctgtgcgtggaggtccggtatcaggccactgacggcacagtgggctcctgggacgatggggacttcctgggagatgagtctcttcaagaggaagagaaggacagccaagagacggatggactgctcccaggctcccggcccagctcccggcccccaggagagaagagcttccggagagccgggaggagcgtgttctccgccatgaagctcggcaaaaaccggtctcacaaggaggagccccaaagaccagatgaaccggcggtgctggagatggaagaccttgaccatctggccattcggctaggagatggactggatcccgactcggtgtctctagcctcagtcacagctctcaccactaatgtctccaacaagcgatctaagccagacattaagatggagccaagtgctgggcggcccatggattaccaggtcagcatcacggtgatcgaggcccggcagctggtgggcttgaacatggaccctgtggtgtgcgtggaggtgggtgacgacaagaagtacacatccatgaaggagtccactaactgcccctattacaacgagtacttcgtcttcgacttccatgtctctccggatgtcatgtttgacaagatcatcaagatttcggtgattcactccaagaacctgctgcgcagtggcaccctggtgggctccttcaaaatggacgtgggaaccgtgtactcgcagccagagcaccagttccatcacaagtgggccatcctgtctgaccccgatgacatctcctcggggctgaagggctacgtgaagtgtgacgttgccgtggtgggcaaaggggacaacatcaagacgccccacaaggccaatgagaccgacgaagatgacattgaggggaacttgctgctccccgagggggtgccccccgaacgccagtgggcccggttctatgtgaaaatttaccgagcagaggggctgccccgtatgaacacaagcctcatggccaatgtaaagaaggctttcatcggtgaaaacaaggacctcgtggacccctacgtgcaagtcttctttgctggccagaagggcaagacttcagtgcagaagagcagctatgagcccctgtggaatgagcaggtcgtctttacagacctcttccccccactctgcaaacgcatgaaggtgcagatccgagactcggacaaggtcaacgacgtggccatcggcacccacttcattgacctgcgcaagatttctaatgacggagacaaaggcttcctgcccacactgggcccagcctgggtgaacatgtacggctccacacgtaactacacgctgctggatgagcatcaggacctgaacgagggcctgggggagggtgtgtccttccgggcccggctcctgctgggcctggctgtggagatcgtagacacctccaaccctgagctcaccagctccacagaggtgcaggtggagcaggccacgcccatctcggagagctgtgcaggtaaaatggaagaattctttctctttggagccttcctggaggcctcaatgatcgaccggagaaacggagacaagcccatcacctttgaggtcaccataggcaactatgggaacgaagttgatggcctgtcccggccccagcggcctcggccccggaaggagccgggggatgaggaagaagtagacctgattcagaacgcaagtgatgacgaggccggtgatgccggggacctggcctcagtctcctccactccaccaatgcggccccaggtcaccgacaggaactacttccatctgccctacctggagcgaaagccctgcatctacatcaagagctggtggccggaccagcgccgccgcctctacaatgccaacatcatggaccacattgccgacaagctggaagaaggcctgaacgacatacaggagatgatcaaaacggagaagtcctaccctgagcgtcgcctgcggggcgtcctggaggagctgagctgtggctgctgccgcttcctctccctcgctgacaaggaccagggccactcatcccgcaccaggcttgaccgggagcgcctcaagtcctgcatgagggagctggaaaacatggggcagcaggccaggatgctgcgggcccaggtgaagcggcacacggtgcgggacaagctgaggctgtgccagaacttcctgcagaagctgcgcttcctggcggacgagccccagcacagcattcccgacatcttcatctggatgatgagcaacaacaagcgtgtcgcctatgcccgtgtgccctccaaggacctgctcttctccatcgtggaggaggagactggcaaggactgcgccaaggtcaagacgctcttccttaagctgccagggaagcggggcttcggctcggcaggctggacagtgcaggccaaggtggagctgtacctgtggctgggcctcagcaaacagcgcaaggagttcctgtgcggcctgccctgtggcttccaggaggtcaaggcagcccagggcctgggcctgcatgccttcccacccgtcagcctggtctacaccaagaagcaggcgttccagctccgagcgcacatgtaccaggcccgcagcctctttgccgccgacagcagcggactctcagacccctttgcccgcgtcttcttcatcaatcagagtcagtgcacagaggtgctgaatgagaccctgtgtcccacctgggaccagatgctggtgttcgacaacctggagctctatggtgaagctcatgagctgagggacgatccgcccatcattgtcattgaaatctatgaccaggattccatgggcaaagctgacttcatgggccggaccttcgccaaacccctggtgaagatggcagacgaggcgtactgcccaccccgcttcccacctcagctcgagtactaccagatctaccgtggcaacgccacagctggagacctgctggcggccttcgagctgctgcagattggaccagcagggaaggctgacctgccccccatcaatggcccggtggacgtggaccgaggtcccatcatgcccgtgcccatgggcatccggcccgtgctcagcaagtaccgagtggaggtgctgttctggggcctacgggacctaaagcgggtgaacctggcccaggtggaccggccacgggtggacatcgagtgtgcagggaagggggtgcagtcgtccctgatccacaattataagaagaaccccaacttcaacaccctcgtcaagtggtttgaagtggacctcccagagaacgagctgctgcacccgcccttgaacatccgtgtggtggactgccgggccttcggtcgctacacactggtgggctcccatgccgtcagctccctgcgacgcttcatctaccggcccccagaccgctcggcccccagctggaacaccacggtcaggcttctccggcgctgccgtgtgctgtgcaatgggggctcctcctctcactccacaggggaggttgtggtgactatggagccagaggtacccatcaagaaactggagaccatggtgaagctggacgcgacttctgaagctgttgtcaaggtggatgtggctgaggaggagaaggagaagaagaagaagaagaagggcactgcggaggagccagaggaggaggagccagacgagagcatgctggactggtggtccaagtactttgcctccattgacaccatgaaggagcaacttcgacaacaagagccctctggaattgacttggaggagaaggaggaagtggacaataccgagggcctgaaggggtcaatgaagggcaaggagaaggcaagggctgccaaagaggagaagaagaagaaaactcagagctctggctctggccaggggtccgaggcccccgagaagaagaaacccaagattgatgagcttaaggtataccccaaagagctggagtccgagtttgataactttgaggactggctgcacactttcaacttgcttcggggcaagaccggggatgatgaggatggctccaccgaggaggagcgcattgtgggacgcttcaagggctccctctgcgtgtacaaagtgccactcccagaggacgtgtcccgggaagccggctacgactccacctacggcatgttccagggcatcccgagcaatgaccccatcaatgtgctggtccgagtctatgtggtccgggccacggacctgcaccctgctgacatcaacggcaaagctgacccctacatcgccatccggctaggcaagactgacatccgcgacaaggagaactacatctccaagcagctcaaccctgtctttgggaagtcctttgacatcgaggcctccttccccatggaatccatgctgacggtggctgtgtatgactgggacctggtgggcactgatgacctcattggggaaaccaagatcgacctggagaaccgcttctacagcaagcaccgcgccacctgcggcatcgcccagacctactccacacatggctacaatatctggcgggaccccatgaagcccagccagatcctgacccgcctctgcaaagacggcaaagtggacggcccccactttgggccccctgggagagtgaaggtggccaaccgcgtcttcactgggccctctgagattgaggacgagaacggtcagaggaagcccacagacgagcatgtggcgctgttggccctgaggcactgggaggacatcccccgcgcaggctgccgcctggtgccagagcatgtggagacgaggccgctgctcaaccccgacaagccgggcatcgagcagggccgcctggagctgtgggtggacatgttccccatggacatgccagcccctgggacgcctctggacatctcacctcggaagcccaagaagtacgagctgcgggtcatcatctggaacacagatgaggtggtcttggaggacgacgacttcttcacaggggagaagtccagtgacatcttcgtgagggggtggctgaagggccagcaggaggacaagcaggacacagacgtccactaccactccctcactggcgagggcaacttcaactggcgctacctgttccccttcgactacctggcggcggaggagaagatcgtcatctccaagaaggagtccatgttctcctgggacgagaccgagtacaagatccccgcgcggctcaccctgcagatctgggatgcggaccacttctccgctgacgacttcctgggggccatcgagctggacctgaaccggttcccgcggggcgcaaagacagccaagcagtgcaccatggagatggccaccggggaggtggacgtgcccctcgtgtccatcttcaagcaaaagcgcgtcaaaggctggtggcccctcctggcccgcaatgagaacgatgagtttgagctcacgggcaaggtggaggctgagctgcatttactgacagcagaggaggcagagaagaacccagtgggcctggcccgcaatgaacctgaccccctagagaaacccaaccggcccgacacggccttcgtctggttcctcaaccctctcaagtccatcaagtacctcatctgcacccggtacaagtggctcatcatcaagatcgtgctggcgctgttggggctgctcatgttggggctcttcctctacagcctccctggctacatggtcaaaaagctccttggggcatga

SEQ ID NO: 19 - DNA, 108496 bp, Homo sapiens
gggagagcatgcgggctttttcacccatttggagactctgcctgcagaatcctcaagacattcatttcattcattcgttcactctttttttcagacaagggttcttaggatcattcattcattctatacagatttgctgatactgtacaggttgcctctcagaatccagtgcctgttctcagtacctatgctgactggtaggagggataaagacagccttacaccctgggagaggcggtccagagtagaaacatcagacactgtaggagaaagagccaaagaacaggaggcaacagccagacttgcatgttagatggttggagtctgaaaatatccagagtaaagaaaggtaggtgtaacctagtatttgaaagtgctaaacagcaagccagcgctcagggcaagtggccaggaagctttccaagaaaaacttctgggaggataaagggaggtctgtgaaaggaccgaccgcaaagtcgggcgggtactgcacacatgacccattaactacggctcttccggccttgccaggttcttcgagcgggcacccacccggtatccttccctccttcaaccaacaagtactgaccttgcccgaatgctgggtgctggccctgtgcgccggacggaagggcctgattttctcgcattttctctaagcgctggaggctgcccgcctggggcgtctccaagcactaaaccccacgtggctccatctcctcccccttccccggctacatccatgcgaggtcccttatgccctgctggctgtgccccacttgccagggagcgccttcctgtgaaggggaatctggggaggcccccgcccgtgcctgcccacttcctactctgaaaccacaaacctctaggaaggcccctcgccccgtcgggtggaaaattggctcctcggggttccttcaaccccaaagtccgggggcagggggctgaatttcgatcaccgaggagggcgctagtggaagggggaggggaggaggcgctccctcggccttacccgggcatgagtccagggggcacgtaggcggcattgaactcggtcagtagggtgcccgcgctgcgggaggccatggtgggtgcgcgagtacagcgagcctggcgctccgctccgccccacggtaaacagcggcgggtcacctggcaacggccacggcggcgagcctggcaacgccagctggccccgcggtcctcgcgttccgagacactgcgcccccctggcggccacctcccggagcagccccatagggcgcgcccagaaggcgcctcccatttccgcgagctctgctgggtgacccctgtcacttgccccggcgcgtcggggctctctgccttgctgcctgcgggatgtgcagaggctcagatgcgggagggaggcagaacatcgctggagaggcctggcgggatccgtcttgcggtgacccggcttggaacgcgacgctaccacaaaggacaggccaggtcctgactttggaggtcacgcacgaagcagctgccccaccgtggctcaggcccagaaacctgagtggccttagggtccccaggagctatgtctctccaaggcttcccctgcaccccagctccatgggagttccaggaaggggctctgtagtgggccgcgctgggcgaggttgcctaggacgctgtgtgtaattgtgtgtgtgcgtgcgtgcgtgcatgtgtgcgtgtgtgtgtgcgcgccttgcgaagaggagcatttttcatttttcttcttaatctctagctgatggcttccttctcacctcatcatacctgtaaactactccacaagaggcaaaaagaaaatcatagaacgtctgggtgtgtgatttacatttgtccccaatgctgccgttcattttggggatggcatccgcaggggtagcgcttgccccagagagcaggcctgctgaaggcccaccccctgtgtaatcctccctgtgactgcttcagcctccacatttgagtttctccagggacccttacaccagccttggtgcctagggcaggcacagggccttcggcttttccataaggggtgagggtatggggacagcttccacggtgccaggctcttggtgactcgggtggaggccctgccaccccagctccctctgcagcagtcctggtgtcatgaagaagcctggcagttcccactttgtctccaggtcttgcttcttcccttcagatgccggatggagagcagtgctcccctcgcacttcggttctgtaaatggcagtggatgaagaccgcagacgctactgggttcacagaatgtggctgccaccagcattctccaaagacttcccctggcaaatgccaatgaaatgaaggggagccacaggcttcccagaggctcaggaagcagaaacactgaggcctggttggaaagagagctgtaggcaaaggaacggctgcaaacaaactgggtggaaggaaaatccatccatccttcagaatgcagtcatgtctgtatttttctaaattctcattggggaacatgttctacaataaggaaaacatgagtcaaagacccccagccctggtgaggttgaccgcctacttcctcccccattcagggctgcccagccagtcctgctggtaaacccaccaccctgccttccacctgcctgtgttctagtccatctgtctcgtctgattgggatcctgtgccatccatatcatattcatccctgaatctcagcacctggctctggaaagaattcagtaaatgttcattacataaattatatactcagttaccaaaatgggtaacagaagaatggaaattaaaaagtgggttctggctgggaacggtggctcatgcctgtaatcccagcattttggaaggccgaggcaggcggatcacttgaggtcagcagtttgagaccagcctagccaacatggtgaaaccccatctctactaaaaatacaaacattagctgggcatggtagcacatgcttatagtctgacctatttgggaggctgaggcaggagaatcgcttgaacccgggaggcagaggttgcagtgagcctagatcactccactgccctccagcctgggtgacagagtgagactctctctcaaaaaaaaaaaaaaaaaaagagtgggatctgtctcttaggttttcagaaaggccagctgactccattgagagctgctgagtggaattgctaccattttatggatgtggaaagtgagattcagcatagatcaatgccttggctagggcaggatcatgggctttttcctaaagatgcacagggtctataagaggcctcatgaaattcactcctttcaggggaggacctccagagaaccaaggaagaagatattttctgttgttgttgttgtaccttgtagtcaccaagccttaaaaacacagatcacctgatgacctcatggatggaaaatgctagtgaatttaggtgtttttttttttaagacattaaacttatctagcttttgaaaatttagcattcatacttgtattcaataaacagaatactctaagacatttttaaattcaatatgattagataaatgtgagaaaggtaagcaagaattggttaggaaaaagtgcaaaggaaaaaaacgtaagtagaaaaagaaaaatagggcacagtagcaaggaaatatctagaaggaggaaagaaggctcttgggacatactgtaggttatttggaatgcagaattcaaaagaagtaacctcttgttaccatgctgtgaaaaattagtatttctctttttaacctttagactctgtttcaggtagatccctgagctcactcttttatcctttcaacagtaattgggcatcctacggtgcacaggataccatgtggggctctggggtagagggatgctgtgctccagggccctcctgaggtcaggaggggaaaaggcaagggaagcagccccaggactcagtaagatgagaggaggcaggagcagcacagaggaggaccccaacccagctggggtgcgggtacagaggcacctccaggagcaggcactcaagctgagtccagggtggggtggagggcattccaccaagaatgaatagcaagaacaaggctgcagatgaccctgcacagattccagcatcagggattctggcccccagcgtccctttccttggtgtatgctgctggaagacaggagggggcagttctcttttggtccttagaaatttccctatagacatcccttctcctgcccctagcagcttataacagcagaaggccattcaattctgctcctctggctggaaagcaaacatcagcctggcttaccttcgctagcctgcctgacccccagccttggggtggggctaggttagtgccctggatccttaaacatggcccctggtagcacataagcctctgctgcctccacaaccagccatctccatcatgcatggcctggtcctgagcctcccctcaggcagcagccccagcctctctgcttcctgagattcagaaacagggatcccagggcagggctcagggcccagcctcttgggggcacagtctccagcagggaagaggtgggcgtaggtggacaaatacattcccttcttcttgtagtgtgcccctgtgggtgggagtgccccccgccccacatccaccctacctatgctcatgcccactcctctgtgcccactactggtggcagggcttgcttagcagggaagcagcagagccctgcagaggggtgggcagagcctcccttccaggagctgggagaagacacctgaagctggacagagctttatctgggagccggcggctgctgaataatgaattccaactctgccgcactcccaggctgcacattgggtgcacacacacacacacacacacgcacacaccgatacacacacgctgggctgacaacttggaggggcgggggctgtgaggctctgtgagtcgctgcaggagcagcttagctcggcttggttgccttggtctctgtgggcagcatcggaggggggtcgggaggaggaggaggaggcagcggcagagaagagagaggcgtgtgagccgtgctccaccggctagctccttcccgctgctcctgcctggcagtgccaggcagcccacaccagcatggccttgctcatccacctcaagacagtctcggagctgcggggcaggggcgaccggatcgccaaagtgactttccgaggtagggaagccgctgtctcagagggacgccagctctgagagctggaccagcccatgctctggaggtggccggggataggacagggctgggaggatgggtgggaaaagttctagcaggggctggggcgacgagccttttcacaggtagtcatctgcctgggactgactggccattgtgatttctggaaaatcagggtcccctgttcttccatgcctgtgtctccttgtgcttgccaacatgccagttccccgggcagggcacagagccctctgcctggggaggcagaagtgaggaccacatccctgagctcagggagacccaggaccccctccttctctctctctccctctcctgcaggttgatttccttgagcacagggtgggggccgggtatggagcctggggcacccagggtgactgggagaaaccaggcagccagtagctccctgggccccagagtgatgggggacactgttggcttcttttagatctattcatgggcgggaaccccgggagcccctcgcctctcttctgtctggtcttttctcatccttttcactcctgtattcagcgaccatttattatgatctactgtgtcccaaggataggggtagaaacacagagctgagcacaacccagccccagccccaaggagcctgcatctgttgggcaggcgtggaacaagcaggacaggtatgtgagacagaaggtgggggtgcagcatgcaagctacagaagcagcaccctcacccaggctggtgaccggtggtcagggaaggcttcccggaggaagtaacactcagctaatacccgaaggaccagcgggtgggagctaggagaggaggtaaggactgaggaggcagaggaaacagtgtgcccagagctgagagaggagctgaaactctggaactgaaagaggttccatgtgtctacagctcagagagggtgcaggagcggaggccagagagccaagcagggcaaggaggcgaggctggacctgaccccggggacagcggagcccctgagcattttaagtggggaaaggcagggccaggctgactctgtccttcaccacccacctctgcctctccatgtggttgctgcccagccctgagggttgggggtacttctcactagacatggccccttctcccgagagaggggtctgagagtgggatggggacgaggtggtgagaagggggcagagaggacccccctatactaaagagcaaagtgagccttggggcccaggctggacacagtgtctgcacctctgttggaagggatgggagagaccattggcagaacattccagcaagagccctggggcacccacatcacctacccagaggccctgggatgcccacattgcagcttgtgttcatagggacaggcaggggtggaggtgatggcagtggccctgccggcaggcggaggttaggcaggagggagagggaggtgtgggctgggctgccttttgcctcccaccccaacccactgactgctttctctgcagcaccctggatctccctctgtgtgccacctgcaggctcatgctggctttagaaaaagcaaatgtgtcctttcatctgtgaaatgtggccctgagctccacgggcagcatagtgtggggcggttaagctacaggttgccatcctgctgcagctgtgctggaacggtccaggctgcaccggacaggcccacttgcaggccgagaaaccaaggttcaggggtagaacactgcgcgtggcattcacggaggagctgaggcacggtggtcccagctctcaggacctcatcctgagtactcaatcttgcaagctctttatctgctcctgggccacctgggggccagcaccttgtctgacacccatcttctccttggagcagtgaagggctgggcctttagcctcactgaccacacaggaattagtttatttgcaacccttgctctctggactgagtggagaaatcgcttccaagctccacattggcaggaggtggccatgggcagagctcctggggaagggggctgggcagcaggaataggcagatgacaagcagtttccagaaagtacctttattacaacgaaagatgcctcagccgctcacctgtgtcatctagcagttcacagttgtaggcgccccaaaagaccaacactgaccacaattcagagggaatggacccgctctacaatgttccttagcatctcccagcacatgcaaccactgggggccaagcaagtcctctgcagggggaaacaagaaactggtaaacacgcagagggagacactggccccaggctccccaaggcttttgagtgaaagtcaatgccgggggaggtggtgagggagcccttggtgagctgtgcccattggcagtggccctaggtaggccagagcagctggttgaaatatggcttgaccttctgtgctgtgccatccaagacactaaggaaagagccctcctgggctattgtggaaaaagttctggatatggagtcagaagccctagatcctacctgggttctgccactcaccctcagtttcctcatctgtaaaatgggcatgataataacactcacttcactagattgcttcagggaaaccataggtatggaagagtttgtgggaagagtattcaaatggtcgatgtgtttgtgaggcagccattcccattctccttgggagcagctgctggcccctgaggtatcttctctccagaccagcagagggccccatgtgagatataaagggaagaggagagcacgtctaaggggttccagtctgccaggagaaggcagagagcctggactctgctctgtaggagcctctgctgagatgttccgcaggaacccaggcaggcagacccccgagactcctgttctcatctggctgggtgtgcaccagctttgcccgtggccacctcttttcccactgccctcaggccagtcggcccctcggtcagtgctcccagccagttctgtatctagctcttagttcttactgcccctggctgctcctaagctggtgctgccctgttcatgcatttcctgaacatgctaatatttgtgcacaggcctgggaccctgaggtgaaggggccagcctggccctccaggagtcacaatcccattgggtcagacaggagatagggagtcctgggcgaatctctattgtgcctgcaggccacagggctcagctgggtttctcattaacaaaatggagacagtggtcctcatttagctcagaggcctgcagttcccaggagtaatcaagagtgggctatctaagaaggagccatcttgaccacaggttgctactcaaagagaggaagtattagcttcaggtatttcctttatcaactcctgagatagttccctacatcaatcacagagccacagaacgcagggtgtgaagggtcccgaagttcttctagtccaaccttctgtccagtgctgagcaccaaggctgggggacctggactgtaagggaaccaagtgacagacagtccagggccaaccctgatgtctcccttctctttctatcccctgagccttcttgccaagacatgaggtttggggattttctgtgtgagataagaacatctaaaggctggatctggcttccacataattcactgtggctggaaattggcacaaaggtttgcagggcatccccctccaccttttcattcttactcttcttcccaccctccccctgattcccaccctgctatgttcccactacattcaacttccagccattcccaaaagataccacacccttttacacctccaaactttgagacatcgatcatatttcttctgcctggaatgaccaccctccaccttgagaacgcccattaattctgctcatccttcaaggcccagctcatatgctacctcctccatgaaggagtagtactttgcacacaaagtactcctctagcagtactttgcacacattcttcctactgctctgccaaggtacattgcatttcagaaactggccacacctctgcatgctgcccaagcttttgagcatcttcaggacagacatcagacatggtttctgtctttgagggattcactgtgtcatgggtttgagttcttccactgtggcactgtcactctttggctccatttccccaactgtgagctctcaccccagaactttctatccaaggaggatcaagggactggaagaggcctcaagggccaagaaccaagaaccttggctcttactccttccatcaacttccctaacccagagaatcttctagggctccagaggggcctaacgatttttttttttttttttttttttgagtctcgctctgtcgccaggctggagtgcagtgcagtgcgatctcggctcactgcaacctccagctcctgggttcaagcgattcttctgcctcagcctctggagtagctgggactacaggcacacgccaccatgcccgactaatttttgtatttttagtagagacggtgtttcaccatatttcccaggctggtctcaaactcctgacctcatgatccgcctgcctcggcctcccaaagtgctgggattacaggtgtgagccactgcgcccagtcaagcctaacaaatattagcaagttcagctccagcccataggtgggaagcaagagggattgcgtgtgtaagccagagtcagttaggggaagacagaggaaggagaaagggcagacgggaaaggaggtgggagcaggctctgagttggcccccggagctcagaagggaggcgggagtttttattgagcaggggaaatgggcggtatttaagaagccaccgaagggtcttagttcattggcaggatcaaaggccatgaaagggccaggcgtggtggctcatgcctctttccgagccttactgcgaccacacgtggggcaggatctcaccatctgacagaggagaagaaacatacacacagaggtgaaatgagtgcagcatacaggagggccagcggtgggggtaaatagcaacaatgttcagaggatgacagcttacttagagctacagagacgagggaaaaggagcaggaggaggaagtgcctaagctgggtcttgaaaaactgcccctgtttgtacctatggagatgcaggaagtgaggaattggtgatggaggaaggtgaagtctttttgggtgagggaccgaccagaccagaggccagaggaggagaattgcagccaagttccatgtcggggaagccacaccatgtagctggagcagaggctataggaagtagaagagggagaccagctagggagggagcagtgggcctgctgagtgattgtgcagggaagggttgcagctgaggcactggggacaagatgtccccctactgttggctgcaggctccacctctgactccacattacatttattttccccagtaaaatgagggagccctccctcttgatgataaatatagctactatttggaaacttatctgccgcccctggtaaaggaggcagaatacccagtgcacccacccctgaaatgctcctgcaatgcctaggcctgtctgtgggctgtggtccagcctagcaccccctctcttggagaatgtgaggttggcattgtccctgctgaaggcagcaatagaggggacccttacgacgaccttggcagccggtggctggctgtggacacagccctgcgcttttgttttagtcctaacggatatgccccctgcatcctccattcttcacagcacactcagtccccctcaccacacctgagggaaatcttctctgcctaatgccccacgtagtgaatgttctcccctcctccctcccccagagcaagccattgcacaccagcgaagggcagacagagcacacagaaaattccccagacttctgctttgataggaagtgtattttcatgtaatggaaatgattgtaaaactgccttcccctgcaaaagccctcaggaatatgctgctggaaatgtgcttgagaacagacttgcaaatcatttctctgaattgggaagtcttggttatcttagccacttttaccgatcatgtgaaagccacatctctcgcacccactcccatccctgggtctcatttttttcttttttctgtcgcccacgctggagtgcagtggcacaatcatagttcactgcaacctcaacctcctgggttcaagcgatgctcccacctcagcctcccgagtagctaggactacaggcacgcaccaccatgctcagctaatttttgtatttttagtagagatggggtttcaccatattgcccaggctggtcttgaactcccgggctcatgtgagctgcctggctcagcctcccaaagtgctgggattataggcgtaagccactgtgcctggccttttttttttttttttaactttttatatataaaaaaactctcaaatacatacaagagtggggagaacagtatcatggccctatgttgtaccatccaatttcagctaccatcaattcatggccaatcttgcttcatttgcatcccatcctacttcctcaccccaaattattttgaagaagatcccaaaccccataccattccatctgtaaatattcagtacacagttataaaagataagagctcaaataaataccacatactttgtcattttaaagaaattaataacaattccttagtactataaactaatcaggcagtcatcaaattcctaattgtctcatcaatgtcataatttttttccaatttattaaaagcttcattttaatgtgttttgtaaatcaggtatttaatcatttatccactcgttctgttgaagggcagccatgtgccacgcactgggggatggtggggaatgagacagatgtggttcctgtcctcaaagggggaagatgaccactgcacccatcatcatgaggagctttatggaagggaggcacaggtgcccaggcagctcatggtgaggaaacccacttagcccaggatggggggaagccaccccagtgcgtgagccagagtcagttaggggaagactgaggaaggaggaagggcagatgggaagggagggaggagcaggctcctagttggcccctagagcccggaagtgagtcaggagtttttattgagcaggaggaatgggcggtatttaagaagcccttgaagggtcgcagctcattggcaggaacaaaggccatgaaagggctgggcatggtggctcacgcctgtaatcccagcactttgggaggccaaggcgggggggatcatttgagggcaggagtttgagaccagcctggccaacatggtgaaaccacatctctactaaaaacacaaaaattagccgggcgtggtggtgcacgcctataatcccagctactcgggaggctgaggcaggagaatcgcttgaacccaggaggcagaggctgcagtgagccgagattgtgccactgcactccagcctgggcgacagagcgagactctgtctcaagggggggaaaaaagccatgaaaggctccatcccaggcagaggggctaacactagtgcagacgtggtggtgtggagatgcatcaggggagtgtggaggggagaccggaaggcagggcacgggggacgcagccaaacacggagggtctttggtgtcacactcttagcaggagaatgggatgctaagatcttgttttggagagaaggctctagaggtgaggactgcgggcagggacactggggaggaagcccggggcaggcggagggctgagtgcctcagcaggcgccatgagagaggaaggagcggcgctgggatcaggggagtgagtgacagggcagggcaagagtcaattgtggtcctggggaccaccgcggacccagggatttggggtacagggccttagttgattctcatctagacaggtgccagttgctgacaccctgaattctggcaaacatggagacatcagggtggaaacacctggagccactgccatccaggtgggcgccttgagggccaggccccttggctgctttcccagcagcagcatggagcctggcacagaacagacctggcatagaagtgggagcaaggaacaccgcctgtgggtgcaggagcagtgatcagttagcaacaggggcccccctgcagccagccatccaggcagcaccagacagtgatccatttctctcggtgacagttctagaaaaggctccggagacagggactatcatgtgatcatttttaccctagaccgcttgaccgctttctgtctgaactgatccacctgctagacgctgcctcaacagtcctcgtttctattttattttcttttacttcaaagcagaagggctaatctgctgaggtggagacgagttttcacccactggcttttttttttttcagccgaagtttaaggtaaagtcaggactgcagtttccacaatatttttaccctatcggagagtaaaagagtcaccctcccattatacctcattgtattcccagtgcctggcacagaatgggtactctacacacttgtggatcactgggaccacaagctcctctgtcaccgtaacaggggaatctaggacccagcagttgatgactgtgtgggtggcactgtccaaggctcaaagacaaataccacaggcccttcctgcctcagtgccagggtctgaaaaatgggaaccagcgctttcagtcggttgcagggcaaagtcagagtttgagtgaggacctggaagaagggtttgagctgagccagagagatgggatttatcatccctgccctgcccctgcctctcagatgaatccctgacccaagcctaagtttccatagtgtaaacctggatgttagcagggtgggttaaggggaaatacatgagtggaggtagaaatgatattttagtacaatttgtggataataaagggttagagttccatggggcctccatttagctgagaaatggggaaaatggaaggggtaaccttttccagtgggaggcccagggactctgcagtatcccaagtctggctctgtgagtcattggtgattttcagagagtatactatgtaagaaacatgaggaacagctgctttcttggacaactctttgaagtgaatttctttcttctaccatgccatcaactgtcattataaaattgaagatgtgtttctcatggggaaaaaaattgttattacaagagatatgggcaattagacaagtctcaatacatttcaaaagactgaaatcttacagagtatgttctctgaccatagtggaattcagctaaaaatcaataataagaagattatctttgaaagttccaaatatttggaaattaatgcctttcttaacctatggtcaaagaaggaagtaaaagagaaattatgaaacatttttaactgaattataatgaaaatacaacatattaacatttatcattttaagtacttacagcagaaaagaagaaaagtgtaaaattgtaatctaggtttctgccttaaaaagataccaaaagaaaagcaaattaaacccaaatcttgaaaacattatgttaaataaaagaagccagacacaaaagaccacatactgtataacctcatttacagtcaggcatcgcttagtgataggagtacattctgaaaaatgcatcattaagcgattgtgtcattgtgtgaacatcatagagtgtacttacacaaagctagatggtatagccaactacacacctaggctacatggtatgacctactgctcctaggccacaaacgtgtacagaacgtaactgtattcaatgctgtaggcaatcatagtacaatggtaagtatttgtgtatctaaacatagaaaagatacagtaaatacaatattataatcttatgggaccactgttgtatatccaagtggtcgttgaccaaaacggtgttatgtggtgcatgaatgtatacgaaatgctcagaacaggcaaatccatacagagaggagatttgtggttgtcaagggctgtggggagggagaatggggagtgactgctcacgggtatggagtctccttccagggtgatgaaaatattctggaattaggtagtggtgatgggtgtacaaccttgggaatatactaaaaacgactgaactgtgcactttagaaggatgaatgttatggaatgtgaattatatttcaataaataaaaatcaaacaccccccaccaaattaaacccaaggacagtataaaaggaaggaaatagaaaatagacaacagagaaatttaacaaagccaaaagttggttcttcaaaaaaaattaataaaatagataaaccctagcaagacttatcaaaaataaaaagcaagaaaacacaaattaccaatatcaggaataaaagagggaatatcattacatttaaaggaaaatatgggaatattaccaataacttacctcaataaattctacaactcagatgaaatgaataaatcttttgaaaaacaacttaccaaaactgacagaaaaagaaatggaaaatccaaagagcctccatatctattaaagaaattgaatttgtaataacaatgatgatgatgacaataaacttccttccacaaagaaaacttcagatctagatgatttcactgctgtattgtagaaaacattctttttttctttttttgagatggagtctcgcactgtcacccaggctggagtgcagtggcgcgatctcagctcactgcaacctctgtctccccagttcaagtgattctcctgcctcagcctcccgagtagagcagctgagactacacgcaggtgccaccacgcccggctaatttttgtatttttagtagagacagggtttcaccatgttggccaggctggtcttgaactcctgacctcaagtgatctgcccatatcggcctctcaaagtgctgggattacaggtgtaagccaccacacccggcctgtagaaaacattgaaaggaaaacgtaataacaatcttacacaaactctttcagaaaatagagaaggaagagcacatctcaattcattttttattatcaaaacctgacaaagaccttacacaaaaagaaaattacagcccaatatctctcatgaacacagatgtaaaaatccttaacaaaatattagccaactgaatagcaatatatgaaaagaataacacatcatgacaagtgagtattatcccaggaatgcaatgttaatttaaaagtagaaaatcaaaatattttaccatattaacacagtaaaggaaaaaattcatgattatatcaatagatgcagaaaatgcatttgacaaaattcaacacccattcatgataataactatcagcaaactaccaataaaaggagcttcctcaatctgataaaaatcatccagctaacattatacttaattcagaaatattgaacattaagatcatgagtcaggcaaagttttctactctcaccacttctgttcaacactgtgctagaattctagccagtacaaggtggcaaggtaaaaacaactcctacagattggaaaggaagaagtaaaactatctttattcacagaaaacctgattggttatgtagaaaatcctaaggaatctattaaaaagctactacaattaatgaatgaatttagcaagttttcaggatatatgattaatacacaagaaaataaattttaccaaagacaggaaagacttccaccctaaaaacaaaacaacacaaaatgctgagagaaataaaaaaaaaaaaaaaccaaacatgtagaaaatagattatgtttatggactgaagattcataattgttaagatgacaattctccacaaaatgatctatagactgaatgcaatcctaataaaaatcacaacaaactattttgtagaaattgaaaactactttaaaatttatgtggacatgcaaatgatctagaatagctaaagcagccttgaaaatggagaagagaattggagggttcacaccacagctgacccctgaacaacatgggtccacttatatgtggattttttttttttttctttttgagacagagtttcactcttgttgcccaggctggagtgcaatggagcaatctcagctcactgcaacctccacctcccgggttcaagcgattctcctttctcagcctcccgagtagctgggattacaggcatgcaccatcactcccagctaatttttgtattttcagtagagacgaggtttcaccatgttggtcaggctggtctcgaactcctgacctcaagtgatccaccagcctcggcctcctaaagtgctgggattacaggcatgagccacttcgcctggccatggtttctcttccttatcttttttcctaacattttcttttctctagcttactttattgtaaaagtacagtacataatacatatacaaaatatgtgttaattggctgtttatgttatcattaaggcttctggttaacagtagtctattagtagctaagtttttggggagtcaaaatttatatgcagcttttcaactatatgaggggctggtacctctaatccctgtgttgttcaagggtcaactatatttaattataagtctaactataaagttaaaggaattaagaaagtgtggcattggtctaagaatagacatatagaccaatggagcagaatagtgtccagaaataaactctgtacatataaaatcaattgattttcaatcaaggtgttggatatctagaactaggtatctatatggagaaaaaatgaacttcaaactcctacctcataccatccacaaaaattaatgtaagatggattatagaattaaacattaaaaacttataagcttctagaagaaaatatagaacatctttttttgtattcttgggttaggcaaaggtttcttaaagaaaaattttaaaagactaaacataagaaataaatttcactaaaaacttgcatttcttaaaaattggaaactctctttggctagtcacagagtaaaaaaaattgaaaactcctattcataaaaaaatcacatttaagaaggcaagagaaggcaagtcacacacaggaagaaaatattcacatttatctgacaaaggacttgtagccagaatatataaagaatccctataagtcaataataataagacaaattatgaaattttttatgtaggcaaaagacttgaagagacactccatagaataagatagacgtatggccaataaacatgtgaaaatgtgatcaacatcctgagtcattagagaaatgaagatcaaaattacaaagagatattatttcacatgctctaaaatagctaaaatgtaaaagtctgacagtaatcaaatgttgatgaggatggaacaactgaaattttttttacattgctgataagagtgtgaaatgatgcaatccccttagaaaactatttggcgatttctttcttttcttttctttttttttttttttgggatggcatctcgttctgtcacccaggctggagtgcagtggtgtgatcttggttcaatgcaacctttgcctcccgggttcaagcgattctcctgcttcagcctcccgagtagctgggactacaggttcgcaccaccacgcctggctaattttttttttgtatttttagtagagacagggtttcaccgtgttagccatgatggtctccatctcctgacctcatgatctgcctgcctcagcctcccaaagtgctgggattacaggcatgagccattgcgcccggccagcaatttcttataaagctaagggtacctatcctgtgacataaccattctgttcttaggaatttcctcaagagaaataaaattatattttcagaaaaagactcacatgaatgtttacagcaactttgctcatatagcccaaccctagaagcacccaaaagtttatcatcaacagagaaatggaccaagaagttgtggtataggcatgcaacgggctattactctacaataaaaatcaatacattacttatatatgcaacaacatggatgaatcacaaaaacattaccttgaccaaaagaagccagacacacaaaaagtacattctgtaggataccttttatatgaagtttaaaacaggcaaactgatctttggtgctagaaatcagagcactggttactaagggactagaaatcgactggaaagggacatgagagaacatgtggaacaaatggaaatgttctatgtcttgattgtgtggcggtatacagggaaatgcatttattgaaactcattgaattttacacttaagatccatgaatgtaagtttcacctagttttaaaaaaagaagagagactcacatctaaaatacctaaaacttgaaaaatattatataagatgaggaaaaaaattatttctgattccatgctactaaaaataagctacaaatgtgattcataatagaagaagccatttttatatttagcacataacttaaaggtctaaaggacaagcaagctgggcgcagtggcccacgcctataatcctagcattttgggaggccaaggcaggaggatcacttaaagtcaggaatttgagaacagcttggccacatgctggtgaaaccctgtctctctaaaaatacaaaaaaagttagccaggcatggtggcacacgcctgtaattccagctacttaggaggctaatgcaggagagtcacttgaacccaggaggtggaggttgcagtgagcggagattacgccactgcactccagcctgggtgacagatcaagactccgtctcaaaaaaataaattcaaaacaaaatagaatgaaggagaaacaagactatttagtagactgagaatagctgtttcttattgagggataaactgcaccaaatgctattgtaagcattattatttccttcattttaagggtgaggaaacaagggcaaagagaagttaattagcttcatccagggcacgcaaactaggaagaggcagctgggatttgaactcagggactctggcccaagagccttaacctctatcccatgccccctcgtgcttgtaaaggacttgatgctttacttagactttcccacaacagtttcttgtcatcctcgtgatggtcccaggacacaggctggtccaggataatgacccccggctaacagatggtgagtctgagaccccaaggggttggatggccagctcccaggcctccagaccatgggccgttgtgccgggccgcacacctgagtgggcctggctttttcctgcacgcaggggtgcttgggccctgcttcctggtgctccatgggagtatctggccttcaaaaggaacagatcgatctgaagtggggagagagaaaatacagcaggaccatcactcagagagtcgctgtagaggaagagagggagaggagacgccaggacatgggagctttgtgggagggaatgggactatttgctgagctttgtacagcccagcccaggcagtgcatacaacaaggctttgctgattttaaataacacaaggaaatagcagccccaggtctgagtcaccagcagagttttactctatttctcagctcacacagggacaatagcaatggcaggcactgctgggagataggctagtgggctgggccctggcaaaatcacgacgtccttgaaaacagtcccaggaccttctccttccccttcggatggcccaccacctcaccctctgccctttcgggaccccagcccctctccagtcttgcttccacaggctgctccctgagggcagaccattcttgcttttcccttcaccatcgggactcccctgtcctgtgtccagctccttggaggctctactctctgctctacgctttcaaacatttccttacactgttctctctgcctggatttccctccttctccttgcttcccagtctctctgaatatccagatttcttctggtcttctagcgtcaatgcgtgtgcctctgcaatgcctccttaatccactacattgagagtcattgctccttttcctgtgttctcactttatttacactttttgcatgccaatgacaaaattctgccttgtatcatcggcagaattttccatgtctgatatatctccctctggattgtaatacgctcttaaaggcatcgttcagattcgaatgatcttagtacaactcccctctgtgaaggccaaatggcacacaagccaggagctagaaagccctggttgcctgtggaaatgaatgaacacacatgggctggcagccgtgtccctgcacacctgccttttctcagaggtgtggccctagcagggtaagctgtctggaagagggagctattttgtgcagatggaacattttgtccccttaaatcatgtcccatgaaaggccagcatggcatcctgcttctgaaacaagcactgagctcgtctccatttggagaagatctgtcgtgtgggtatttttaaatggtgaaaggagaaatgggtatatctgataccatggcacttgttacactttaagcacagactctgttattcatactccatctattgactcagggaggagtttatttcaaaccaaacagctcagctatcccaggagcagctgcctcagaaggaaggaggatgctgttctatttcccccatcgaacctccttctcactcgatccacaacagcctttccatgcaaggaagaggctattttctttcaagctttattctccattttccctgtggcaagaaaggtgattggatattgggatttgtaatggttttatctgaaagccatttaaaatgaagctggaatgtcaacaagactgacgctgaatggagtagatgtgaagtggaaatgaacttgaaacaagagatggggttagtcatccccctgatcacttggaacagatgatggaggtcccctgcctctgctccagtgaacagaacagaaccacttgaatactgccagccactgtttgtacataccctcctgaaacggctcttccaaaatgctgaaggacattttgttttcttaataatttggcctttccactgtttctgtatgattgatgtgtttcagcaaaccttttttaaaaaagaatatctacaggtaaatttagctcatcatgtttgagaatattcaccatctctaaatccccagggcctaaatcaatgaggttttagcacattttgaaacagaaccctgatgtataaattctgcaatggctgatttcacgtattttacttcctctctaacaaagctatggaaaaatgcacaagcaggggagggtttgatcctcggtgtttcctgcagatgtgaatctgacaccaccttggagcagggcccctccccaccttctcccaatcctccgctgggttgctgcatttttcactccaagagaccccggaggacagctatatccgaggcttattaaaatcttctaggatgcaaaggcctttggttattcagagcagcaggtctttaggggaagcccccatacacaaacatgctcagctgattctcaatttatattgtgtgttacctgcggggaaaattaaaagctcaaacctcaggcactttccctctcctcccttgattgcccgggggcttgttgttgagatatttcttgttgatttttttgttttttatgtctctggctggtgctaaacattctttctttcccatcatgtttacttcacatctctttgccgtatagatagcttctgctttatggttttttcctccttatctcagatgcagccagcccttccccacctgcccccgccccaaaacacacacacgaacacacaccctttcagactgcatccacactctctgtttcagtggatctgacatcaacgaccccgccacccccggccctcgtcagaggggagctctgcattgaactaggactagctcctgggtcataaaagttgctaggaccctggagagctcttactaaacagatgaggccaccactgacagaggagagaggtcagttcccggagggaacgagcctgctttgctgagcccccttccttgcccagcccccagacccatcacagggaaggttcagaggagctctgacccctccagtacctccttggcctgacgccgctctagcccgggctcccaggttttctgtagggagaggagcacagtccgctccacccatgccatgggcttcatcagtgacaacccaaactcacccccaaataggaatggcttcaacctggagacagcccttcaatgaaatggtttatgctggtggagatttaaaggtattcgtctttcggctgggcgcggtgactcacacctataatcccagcactttgggaggccgaggtgggagatcacttgaggccaggaattcgagaccagcctgaccaacatgcgaaaccccatctctactaaaagtaaaaaaattagctaggcacagtggcgcatgcctgtaatcccaactacttgggaggctgaggcacgagaatcatttgaaccccggaggcagagtttgcagtgagccaagattacactactgcactccagcctgggtgacagagcaagactctgtctcaagacaaacaaaaagggtgtttgtctttcaattgcaaaaatcaagcatggtcactgaaaaaaaattcaaattcacatttcattttgttttgttttgttttgtttgtctttcagccaggtgcagtggctcacatcaaagtatgctgctttcaatatcttctcactctccctccccagggataaccactttcttttttattttatttatttaacttttttgagatggagtttcactagttgcccaggctggagtgcaatggcgcaatctcggcccaccacaacctccgcctcctgggttcaagcgattctcctgcctcggcctcttgagtagctgggattacaggcatgtgccaccacacccagctatttttgtatttttagtagagacggggtttctccatgttggtcaagcaggtctcgaactcccgacctcaggtgatccgcccgcctcggcctcccaaattgctgggattacaggcgtgagccactgcgcccaggggggtaaccactttcagtggtttgagatgtttgtctcttcatagaagaaatatatgcatatagtttgggttttggtattttttttaattaatggagttctaatatacatgctgccttttttcccttaccatggaattgacacaggataataaattaattctaagcaacaaatttttctttaacccatcctgtctctaggtttctcctcacagaaattacaaccccttctcttgtggttccatcccatccctaaaacagtatttatcctcccttctctgtaccattactgtttcttgtgcgaaattgtaccttggagtatgtactgaatggtgttgtactggaggcctggcgcggtgactcatgcctgtaatcccagcactttgggagaccaaggtgggcgggtcatttgaggtcaagagttccagacgagcctggccaacatggtgaaaccccgtctctactaaaaatacaaaaattagctgggcatggtggcggcgcctgtaatcccagttactcaggaggctgaggcaggagaatcgcttgaacccaggaggcggaggttgcagtgagccgagatcgtgccactgcaatccagcctgggaacagagcaagactgcatctcaaaaaaaaaaaaaaaatggtgtttcccttgcactggtgccctgttggctcctggcctcccttctagaccatcagctacctgtgggtgggagcctgtgcctttgtcattggtccatcctctatcccgaggccccgggacatggcctagaacatcagagactccagcggctgtttctcaaagtgaactgaactagctggtgtttcccacacgatggagccccctcgacctgccctcgattctctcctgacttatttctccccacatcttgggccagttccagctggactagcaaagagggcagctttacctctgtgctcccaacatgccctagtgggtggcgtatggatgggggagcctgggacaatgtgtgtccatctcacacactctctacttcccatgccagtggggaaagtgggggcaggaatagagcccgggagggaactgccagagactgtcttctctgctaaggctgacaggaagacggacaaccatgacagtggtggaaggggaaggcccttggcccacggggaatggctgtctggaagctgacttgttgttgggggcctggtttgggcaggaacccctggggtggctgcagaaggaggctgggcttcacagacccctgtcggcaggcaggggctacgccccctatactaggcttctgctcagggcagcagggcccggagccaccagcagagctgaggaggctgcagaggaggctgagagatccatggaggaagaacatggtggaaaagagtgcctgaggtccgcttccacggccactctgaccagcctgggccttctgtgccttagcattcccgttcctaacatggaactcatggcctttgacccgcttccctcacgaggctgctgagagggtcagagaagaagccgcatggggactggcctcaccctgggagaggtgagcaagccacgaggtcccatgttgcatgaaaagtcaaatgctgttaggacgactcccaggatgaggaggtctgaccccatgctcatcgtctggacagctctgaccctagaatttatttcctctttccccacagggcaatccttctactctcgggtcctggagaactgtgaggatgtggctgactttgatgaggtaggaggcccaagactcccccctccctcagccctgagcccagaggggaacagccacccttcgctgcctcttgcgggcacacactggccccaaatcccaggcactggcctgctctgagcccctcacctctcagctgcttcctgaaggaggtggtaaggagggtgtgcaggaactccctcccccatgttccccccagaaacctctgcacaggtgaggcccgtgtgcaaatgacacggggaacagcagcctcgcccacctcgacggccctgctgggtctgggcctgttattccctgtggagaaagagcccacaggtgctgtagacctgaatgtgagccaccagctgagggcccaacgaggcaggcgagtgttggggacgtcgcaaaggccagtctgtgtcagtccccaggggttgaagagcagggcagccccgggcactgaggtaggagccccagtcaccagggaaacattgtcaagcaccccacctgagtgagggcgccatctccagaccttgaggggaagcatagggaacagaagacagtctggattttcagaaacagctctgggggttccatgagaaaagacgtgagctgctggtctattgacaacgatttttctcaatcctcactccagctgggctgttgtcacaattttatcagcaaaggagcaggcgacaccatcccacaggggtgcccaggagcagtgagaggacttacaacgcttccctctccctgcccttcccctcggtacctggccgggctgggagccctatcctcacacacacacaccagctcgagcagcctgcggcctcctccgcctcctcacattctttcgtctatgtgtttgctgcttccagaatctatattcccctctggctgctgtaggttctccagggatgactttggagtgagggccagcagtcatccgtcaccatcttagcacaaactggaagccatgtagtgaccctcaaatagtgtaccccctctctcctggggttggctctcccgcttggctctgtgggggctgggaagggcctcatagcagactgtgcctcttgaggttggctgctggcgttcggctgagcagccaccaggctgacacttggcaccagctgtctccccctcctccagaaaccaggccacacgatgtggctgtgtccatcgacccagagctggagacacagggagcaaaacctcgctcctcactcaggcttaggcacagccatcaaccatcgcggcccagcaccacaccctccccaaccacttcagggcgcagttgccacgacctccctggtacgtccccactgctatgcaggacaggtgaatcactcatttaaagtgaatcactagagctaaggaagtttctgtccttaccttctccccctcctggctgtacaatgacctcagtttctaaacctgccaccatctttgtcaaatggggttggtgatgggtgtgaaggtctctgtgaaatgatgaacaaaatgaagggttatggtgagagtggaatcatggctgcccactgagacagctgtcatagatgcttcaggcttgccccattacacacccggcctgctccctcccctccccatttcctcagtcagggcactgggctggctgggagaagatgccagcagcctggcccagtttcccatagtcctacctccctgggcttctgcccactaatccaccaggcacagcatctgactccctcctcccaagactcccaggggatatgtcagcccaggcgttcagccagggggcaacctgatgccccttccaagggcactgccacccttttccatgcccagcgccttggacacctgagccacaggtatgcacgacattcaaagttaatcaccatgtcgttcctcttcccaactccgcccagcctgcctcagggggagagtctgtctctgctggccctgaacaaggggccacattccgagcatctagtgcatgccaggccgggcttgagatatcccagaggcaggaacctgggctcaacaccccatgatgatttgtatgggagcttagggatggggtagccagagtcagtgtggagagactggggcagggcagaagcagttatggaagaagcacatgactagggtcagagagcagggcacgcgatggggagaagaggctcctgcccggggaaagtgctgcccgcccactggggagacagggaagtttctggttgttgcaatgaggagcctactggcatttagtggggtggggagcaaggatgcagaatgacttgcaatgctcaggccatcccgcacttcccacctgggagccccgtgggaagatggtggcagccccagcagcagcactgagctgcttcccgagccatgccccttccactcaatctccgaaatcatccacagacgaaattaggctcagatggtaactacccttccccaggtgacagagctggaagcggccaagccagggttctgaattcatgcatagattagacctaagccctctctggatacagtgatagggcctgactcccaccacccctgcaaggcccgtgttggagtctctccacaccccctgcctccatttctccctgggcaaagtggcctcagccctggccaccaatggtcagcagtgcacatcccacaaagcaggaaggccaccctcccattccctgttcaggaacggcccggaggcctgggtcagcccagtcccaaaggtagcctggagccataccctggctttaacctttctccctagacccagtggacaagttgtaaacttccctggcttccccctgaaagaatctgcctgccagtggttccagaatatcctgggaaagagccctttcaaatccccctgaaccttcttgactttccagaaagcctcttctctccgtcttactctgcccagggcctgccggagccagcttagtgagacacactggcctgggagtcatgagacctacaccacagtccttgctgaggaacctctttgggctttggattccccttctgtaaaagagagatatgctccctgctctatctgccccacgggactgtcacaaggctaaaaaaagatgaaatgagagacaagaaagcaaatgtctctcacagctctactaggtaaggggttccaagcaagggaggggcccctcctctgctcaggcatgggtgagaggggctgcagcagctgggcttaggaacctgagtggggaggaggatgccatggaagaaagacaatgctctctacaacaatgggtggaaacagagcctggacatggtgtctcctttcccagaggctggaacctgagcccctacatttaacctacaactctggaaaagctagggagagacagagaaagacccagcctttgtgacctggggaaacaggagtagccacctttagccagtttggtttggctctaacacaggccctgtgtggagcaggccccaggggagaggccagagtaacaatagtacttgtgccaatgataagaagaactgctgctatttactgagcacttagtgtgtggcaagatgggctgagagcttgacacaagcattagactcactagaacttgctggattggtagcatcctaggtgataaggagccacaacaggatttaaacccgagtctatctgattccaggacctatggtcatttgtaaagtagacaagactcagccctgccctcaaggggctcagtctagcgggcagatggacccactacaaacaaggagggaccctgggccttctgagccaagaggaagaagaggtctccagcctgggggatgacagggcaggggagtttggccttatctgcccctttctgcttgtaccaggaagtcatggctgttacctcctggaggccagaaacgcacctgtcttgttcgtcattggcctggcacccagcatggagttgagaaaatgttgccgagtgaaagaatgaaaaaaacagtgacgttcactaggactggcacctgtcaccgcaggcctgtgcccagaccgagtgggctcagcagggctagtggtacatcaagccctttgctgtggcctggatagaaaggaagcaggcaaggcacagatgagatcacctaaagggactttagatcaccttgatctctaaggttagagatcatctagtttaaccctcttgtcttgcagttgaagaaacaggtcttagagtggggaagagaattgcccaagaagaccagctgagatctgagatcctacatttaacttacaactctaaagaagctggggaaagagacagagacaaagacagaaacagagagagagagacagagacacagagacccagcctttgtgccctgggaaagtgaaatagccacactcgggatactgagcccaggcctttaagcttgcaaatccgtctctttccattgtactctaaagcagcagtccccaacctttttggcaccaggggctggtttcgtggaagacagtttttccacagactgggatggtggtggctgggggttatttgggatgaaactgttcctcctcagaacatcaggcattagattctcttaaggagtgcacagcctagatctcttgcatatgttgttcacagtagggttcacactcctatgagaatctaatgctgtcactgatctgacattagatggagcttaggcgggaatgctcgctcacccgcggctcacctcttgctgtgtggctctgctcctaacaggccatggactggtactggtctgtggcccgggatatggggacccctgctctaaagctttgtagtgcatctcaatattttcccccaaacctatagccctgtccctttaaggatgctaccttgctgatttaggatggttccaggcccactcagcggccaagctggacataatccagatcattctccaaggtacatcagggaaaccttttttgcagagtcctagatcactggggctgataggatgcagaaccctgtgccccggccagcaccagccaggtcagggctaagcctagaccaggaaactgggtcaggactcagcactccccgggctcctgagatcactccctccaacagaggccctctttccctccctatctgtactacctaccaccttgcttctgtcaacagtcctatcccaggctgctattccaggtctgtgtctgtctccagaactatccaggaccatccccaggactgagaaacaaccctgcatccctgcgttctgcacagcgtcatgcacagagcctggcacacagcaagtgctcagcaaatgttcgcccccagcatggggcttgctggctcgtgacatcttgagtgactgtgtttggcttaactgctacttgagtcccccagcagtaccaggcttcaggagaggattcagtgtagtggattaagccctgaggactgaactccagactaagcatcctgagacttgagtttgaatcctgcctctgccaccaaccagccttgtgcccgcgggcaactctcgcctctccactttcccacttgtaaaaggagcacatctttgccatgttgctgtgagcttggttatgggtaaatgtgctctggaagtactaagtcctacccagatgaaattcttccttcagaagcccttttccttcagtctttttttttttttttttttttttgaggtggagtcttactctgtcacccaggctggagtgcaatggtgccatctgggctcactgcaacctctgcctcccaggttcaagcgattctcctgcctcagcctcccaagtagctgagattacaggcatgcaccaccacacctggctaatttttgtattttagtagagaccgtgtttcaccatgttggccaggctggtatcaaactcctaacctcaaatcatctgcccactttggcctcccaaaatgctgtgtttgcaggtatgagccactgcccccagccccctttccttcaatctaatagctcacaagttcaataccatagtcaggagaggagtgtagctcccaaaccctcaaaatcctcatctcgtcttgctgtgttctcagcatatcaccccaaatggaggaaaggacataaccacaaaaatgaggagacaatgaaaaatgaaattagggaagagaagatgcagtgaaagagacacgtgaaatccacaggccgaggcagaagaggaaagtgatggcggcgaaggggagggaggtggcatgacaaggagacaaggcagttgcagacctgcacagagttcccactgggaagatctaaactaaacacattctgccgtgctgtgtcacttacgactgctgtcacctgtgagatcccatttgattctctcaatagccctctaaggtagatattgtcacccccctcttttcacagatggggaagctgaggcacagctagtgagtggcagagccagggctagaactcaagtctcctgactcaaactcagagtttctgcaacaccacggagactcccagtctgcgtgagatacaagcctcggtgttgtcagaagaacaaaaaagaagcaaagggtgggcatgtcctttggagctctgtgaggtgcccagagctcacagaggctgcctcagcaaaggaaggtgtcagcaatgggagatggggctggaaatgctgtctgggcacagcaagggggcctctgggtgctaggaaggggaatccccacctctttcagggagctgtagaggagccactgaaaagttttaacaaaggagagataaaaagagaggaaaattcaaccccaaaagtctccttcttacagcccatgcctctacttccagggaggccaaatgggagtaacccccagtcccagaccctgagtcacttccctccagccaagaggcccgtcaccctccgaggccccacactgatgccaggaccccacctagaggtgccggcttgatcggtctccaggctgggccttgggatttttaaaagcttctggaatggattgcagttccagccaagatgaagaacccctgagaaagacagagggagacagagacaaagggagagatagagacagagagagaaactgatgaaagaaaacagatgtggtgaggagaagaaagcagacgaatgatgcgggagggaaggaaaagaaatgaggggaaagcctcgtgtgggtggaaaatgcgggagggagacaggggaggaaagaaaggaaactgtaaggtgggagcaagtcagagaccgaagaagctgctgtgactcagtgaggaccctgtcttctccctcacccggaaagcctccaagaagaacattccccgctgacataggcatggactgcccagacccggctgacgaatttctgaaagggcacctgagccacacacctacacacgcttcccctgattattctcatctgcagtcaggggccccggaagccccctgtctcctgtgccctccctgtcccccgactctcactcaacaaactggccctcgccccgcagccaggcagcctccctccccaggtcccttagcctcagcctcccgccaccgttcaacaccccacctccctttcacagggccatctccaaagtcatgtcctttttctcctgatctttctctccttccaatgccaaaatcccacccacagaccctcagggggaccaatcacccctcccctcttcatccccagtaaaccaaatctcggtggctcctgcggccccccgactcccacacagcgccctggctgatgagctgggccttcctgggctgctttatttccctgcagccccataaaagcagcttcattaagaaaaccacacactctgctgagctgccagaggcatccagaagctggagccgcagccgctgaatgaggcctgtgggccgggctgcctccacttcctgggactctcagcgcacccctccgccctgtgcccacctcgcctctgaagccctccctaggccctgctcagaaccctccccaccccaccccgcagacccctctcccgctcctctgcttcttcctccctctcatgccaaggccaggtcctcccttgccagtcctgaagggagatgtcacaaaggccgttttcctgagacaggccctgcccacactgggcagtgacccgcggtgctggcccagtgtgcccaagccctccaagtccccaggctgggagaaggaatctcagctttgggaatggcaaacgtgcagggtgggctcacagaagcctcctcccgagggcctgctcagccagcaacagagtgctccaagtcatgcatctgctctgaggccgagttccttgtttatagagcacagaagccattacccacctctccggccattggaaagactaaatgaatgaatatgcacgtagagcattcagacctctgcataagaaaaagttccccagaaatggcagcgattattactattattatttattactggactattgagcagtctgaatttggtagggtataaaaatggaactaaaaaataaaaagtcactgccttctaccagatctgtcaaaatcctccctgacacggtctctccacagcgtcttgagcagacctcagcgttgtctggtcctgtccagaagggcttcctactccagtctggcatcctgttcacccctggccatcctccttccctcatgcttgtggctcaggatgtggagtgggacagggacccctgctgaggccctccacatcctcccctggtgggcagcccatggaaaaactgtcctcatatcactctaccccacttggccaatggagcgcaaatagatgacttgccacagccaacagtggcaggctgggctccttgccctgctgtactctatgggtctcctgccagtccactgccctgcagatgccactggggatttgcatgccatgctgcccctcttgcaggtatctaatcaccatgagctgtttccccaagaagtaccacaaaaacactacgcctaggacagaattcttcccacctttcccttgcccagtcttctttcccatcccaggaaggtgggctgggtgatggttggaggtaacagggcctttgaggaagccctaggaagatgtctggctctgcccattggcagctttttacagaatggggcactgggccactttagcctctgttttgagccattgttgccacttctagggcaccaggaaaaatcccaatcaaattcctactcatcattaacattgagttagggaggaagcaacgaagaagtggtaagggtgaatctagaaacaatgagttggggacaggctgtgggcctgaccccaataacactaatcagctcaaacctgtccccagtgttaccactggcagagtgaggagtggtttgaactcaacacaggagtctggggcagagcctgtgccagtcagggtgattctgatgagagagagctggaagctcacagctccattcagcacccaccaaaaaccaggctcacacccacattccttgctgtctccctgggacccgaccaccaccctggttgcaccaccctctcccaacccccctcaggagctgggaggccatggaagcagcgctgtgtagggagtcaaaagtcctggtaggtccaggctcttcacctaccacatgaccttgggcaggtcctccaacatctctgagcaccatctttgaaagaggagtgggcaacaatgccggctctacaaggtggttgttggaactaaatgagattccaggtgtcaatgctttgtccctggggagcactgggcccaagtgaggggccactctgactgttggagatccccacaagagattcccctcccacaccccacggctcctacctgttattgccaccgaagccgcagttgtccctctctccccagacatttcggtggccggtggccagcagcatcgacagaaatgagatgctggagattcaggttttcaactacagcaaagtcttcagcaacaagtaagtgtgggatggggcaggaggggctgggcctggacgggctgggagcctgctcttctccttgggctaccctctgtttggggcttaaaaaggggacctacactcccaacctgccctggattgatcttcaaagaccgaagaaatcttgggctggtctttgatccccattttgatccctcttcttgtcttcagaatcccccagttctcccagctgctgtcagccaagaacactccaccctcctatcacctctgctgtctccaaccccatcaaagcttcctgtcttaaagacttaaagctttaagtctccctcaatgccacgctggggtacagttacccactggagaggcgaaaggtggaggggctgatgatctcctccaagagacactctgtagccctgagggcaggcttgacagtttggggtggtggtttaggagtcaggcaagcctgatctcagacactcaggtcagtcatctactgtgtgaccctggaaaggttacataacctctctgatttcaatgtgctcatgtgtgaaaaggacaagtatttacctcaaagggcagctgtgtgaattaaatgagatagatattcactcactcattcaacaaatgtttactaagcgtcgattgtgtatcaggtactgaattaggtgatgcagagggcggggtgcctaccttcatggagcttgcactccacaagtgaagtacacctgccatacgagcgttatcactataaggtgttcaataaaagtagttgtcatccttctctctgggccatgagaagaattcagaaggatttgaacacgctggaacagtggctaagtaatatcttgggttaaaaaatcacagccaggtgtggcacacacctgtagtcctaggtccttgggcagataaggcgggaggatcatttgatcccagtaatttgaggctagcctgggcaacatagtgagatcccatctctttaaaaaaaaatcggttgctcttatacaagctggaggtcatggcttaactgtaacatgtccaagaaggtatggaggtgttagctcactgaggactcagaatgactcaacagtgggaggagactacaaacaaaagaaaagtaggcctcatcctaaatcatactaatagaattaaagcactcctgatctgagcaggagagacaaggagtccactgctctgatactagtggcagagaattcctgtaggcaccaccctatagtttccaggaggaaagggactttaagtgttaccttataacaaatggatgagagcctgaaagggaaaatcatagaggacatattcatccattcatccatccattgatccattcatccatccatccatctatcattcctgttattcatccatctgcctatccatttgtctgtccatcaattgatttatccacccttcctttctttcatccatccttccatcctttcatccatccattcatcaatccatccctccatccatttatcaattcatttatccacccatttatccatctatccattcatccgtccatcctttcattcatcctatccatccactcatccatccatccatccatccattcacccatccttcctttcatccattcattcatcaacccaatccttccatctttccatccattcatccaccacttaccctttcatcctttccattcatccttccatccactcatccatccattcatccatccttccaccttttttcttttccttttttttttttttttttttgagacagagtcttgctctgtggcccacagtggagtgcagtggcctgatctcggctcactgcaacctccgcctctctggttcaagcaattatcctgtatcagcctcctgagtagctgggattagaggtgctcaccaccgtgcccagctaatttttgtatttttagtagagatggggtttcaccatgttggccaggttggtatcgaactcctgacctcaagtgatctaccctcctcggcctcccaaagtgctgggattacaggcgtgagccaccacttttggcccatccttctatctttccattcactgatccatctatcgatccatccattctttcattctttcatccatccttccatccatcatccttccttccatccattcatccatcctttcattcttccatccattcatccatccatccatcttttcacccaactttgcagtcactcatcatacatatagtgaacaaatgctttctgccagtcagacactatgctagtcactggagatactgagatgaggtattgaggcacagtccctgcccctaccctcccagaaggctttttgccacaggaagaggaaagaaaggtgtgtacctagaggcaggatgaggaacaggctgctggaagacagcagacaactgaaagatagccagtattttccagccaatgtgctgtcttaggaggtagtgagctccttgccactgggagagggtgagcaaagagtggaccacattgtagaggggatttctgagtcaggaaaggccccaccatatgggctccaaggagtctctgattctgtgggttttattaggagctttcaaaatctcagctgagtatggggcaagggcatttcagaaatgctgtcagggccacagggaggatgtttagtgcacaaaggccttccctttgcctctcatggcatcacaccattcaggcagctgcttttggcacccacaagcaaggttggtgagacaccccccaccaggggcccccaaggtgaagcagagccttcttccctggggtgagataccatgagggtgtgacctatgaggacaggagaaacaggaacaagtggaaggctcacacacagaccaagtgggtgtgaaaaaggaaggagaatcggaagtcaagcaccagggagggcacctgagagcccctgaaggaacccaaccataggtgccaaagcatccaggagctttacagctcagccactacagccctagctgtgcaggaggggaaaccaagtctcagaggggaacctgaggtcacatgggtagacaatggtagagccagggctagaatgcatgtctgttaacttctcttcctaatccaactcccagaaaccaaaatatttgagcagtgatggtggaaactgagggcatggaagacattgttaaatcatttataatgaaagccaccagcctaaccactgaaatgctggaaacacttgagcccatcaaaagactgctacaaacaaatcagaagtatttgggaaatcgggaaattgactcccatgcagtgaatatgttgaaagttacagcttctattaggtgtttttggtttttgttttgttcagagacagaatctcactctgtcacccaggctggagtgcagtggcctagtctcggctcattgcaacctctgcctcctgagttcaagtgattctcatgtcttggcctcccgagtagctgggactacaggtgcatgccaccaggcctggataatttttgtatttttagtagagacagggttttccccatgttggccaggatggtctcgaactcctggcttcaggtaatagacctgcctcagcttcccaaagtgctgggattacaggtgccagccaccaaatccagcctgtattagatgttcttaagtgccaataagaaggaagacagaaaggggaatagttcctatcctaactctcctcttcttccctccctgcccccatccaagagaaggcaggaaaccccacaaggggaggcccaggcctggtgggagaggttctggcatttctttggaagcctagagaatgcccagggcactgctggctgcagagctgagatgggaaagaagaggtccccttgtggagagcacaggcccaggctgacacaggccagcttgtgggggtcagagtgggagagaggtgtttggaatgatgtgagactcaagtctccccatcctggcatttgcctgggccaggccagaggagcaatgaggccactgccctcaacccccacatggcccagttcagaccccaggctccttctcatggggcagctgagtggaaggggtctttggggtctgcactaggcttagcaatgagcaaagccatggccactgctggggacagtgcctggcacatggcaggctcctgattattttgtggaataaaagaatgaataaatgcccctgtggtgttaggaggcagagggtaggtatacaaggtgggagagcctttgagagggaatcggagtggcccctcttctctgaaggactcagggcactcaagggtgacactcagcatcacatgaccgatgcatttggggaaattgagctaaaagaggcatggaggagctgcctgggagagtgggtcccaggacgagaaatgagcctgatcccatcactgccatctcagagagagagacttgtcctagaagcagagagtagcttggaaactggcccctcacccagtggttctagaggctgccaggaggcagagacatggtatgaaggaaggaggcatcctaggcagaaaccaggagacctccaggtctgcttggccccgtttggaacaaagacctgtgtccaggaaccttgggcttccccatgagaaagaaatgttcggttcagaagattttgtgcatccagctctgcctgtccgggacctctgagggtccatggcctggcctccagcctcctgcctgctaaggatgccagggaccctgaataattcaggagccaggacagcaggagaggcctcgcagggcccaggacacctgacacgggctcccaggggaaagtgatgaattattgacaggattctggtgcccagttgccgctctattgtgatcagtctgtgggcccatctgggctggaggccttttcctgccggctaattacgtggggatcttagctctgcccagccgcccagcccctcgtggggccagacagcctcctgtgaggggtgtcctctttgccatggtgacctggatggccctgtaaggcaagtagtcagaggacatggagttagccccagatcctttgcctgacagccccagggaaactgaggcccagagaggcctcttgtccagggtcacacagcaggttcaggacagtcaggtcttcaccccaggcctcctgacacccgggccagtgctccttcccacagaacacatggcctcacaactccatttctagggaaatgactcagctgtctaaggagcatatgagcccacccttcctcaatcgtcctgggccccactctcccaggcagctcctccatgctgacccatgcagaggagtaagaacctactatgtgtgcagccaggatgcacaaaggccagctgcggcgggcagggtcgcctctggggtcaccacaagggccagagccaggggcttctcctacctcttcctgtcccagcttcttcccaaagaatatctatagaagacgggctgagggatggcatcctagaagcagtgccagggcctttgttttgaaactgttttcatggcaagcactgtgtttttgcttaaatggtatgttacagacctgtagaaagagtcaaggtttataaaactgcttttctttatactttacataaggctgagataatatcaattgtccatgtcaaaaaatataatttttacttttatttgagagaggttggggggtgaactgttaggagttaaaaccccccaagccactcttggaggtgtggcaaattgattcctttaatcttgcaagctcctagcgtcccagtcccaccctccaggccatagacaagctctggctgtgcgaggctgtgcacagcttgaagggtgggggactgcctggacctgcccctgaagcccatcctgcaaaggagactcgccctgtgtaggctctccagatggccagccctgctcattattagggagggaggaggggctggcatccgagtgccggtgttggtagaggaatttcacatgagcagtctcctcaccactgtccggtggaagtcggagggctatagcagaaggagccaaaaccacactgctgccaggaggtggaatctcccttgggtcctgctgagtgagcccacatctgtctgactccagagcccaggctcctcactgtctacaccgcttccctttagggatggaattaatctgcatgtggacagggcttggaccagggtaggaagagtaggggatttgcctggaggccaatcttgctcagcacactgtgtgattaaggcagtggctgaatggactaccagtgacagccccatcactgtcaccaccaccggagtatctagcagggacttaaaagcacatgtcagggaggttgtttcagggattcctcctggaaggggcgctggacaaggtctctcaggttcttcccaagtataagatctgagattcaggcaggttaagcctagaaggcaccagacgcctctgtgagcacttgcagggggaatagctccaccctgccccctgggagtgtcttgtcacattgcagcacctctgcggatcctggggagctgccttggctgttcttaggcatctaattctggagaaagatgtgcctgatcgccccacgctcaacaggtgctcgacaggtcctaggggaatcaaggcagctgaatagccatccacaaagggtaatagtagagcagggattctcaaagtgtctccccagccagcagcttcagcatcacctggaaacttgtcagaaatacacattctcaggccctctcccacccactgaatcagagccctggggtcggggccagtggtgtgaactgaagtccggtggacccagtttggtgacttcacattagaagcttgaagttggccatggcgggagtatttatatctcagaaaccagcaaatgctacagatgagcacctctcctctcccaccagtgacacattttccagcatatccacagaagaggatatcccagccgtgcatgttttcacaagccctccaggtgattctgctcatgctgaagtttgagaaccactgatttagaacaaaaaggggtgaggctgcaaaaagatgagtgtattttttcgtgcccgtggtctactgttagaatgtctacatggtacggaagctaaaagtccccttccctcttcattttataaagaccaaattgagactcaggggcagcagctccagggctcctggcccccagcccagcacttctgtctctggggcactgcctgagctgggagaggtgcatgcagctatggaagaaggcttccatgggctgctctaagggcccagaagcccagttcggctttagagtgaaggagtggcgtggtcagtttcatcctcagggaggtggggcacaatggtggttggggctctgagctccaaaggggagcatttcatatccattcctcatggctgcccctaccacttcctcccctcacacagatgggaagatttttaaaaaatcaatgttcaccctccacagacctcagggtggtagagacatgaagcatgtctgagtcagaattcatctgatacctcacctcacccagatctaccattaattagctgtgtcccttccccttccatggcctcactgtcttcctctataaatctcaggcagcatcagatgatgcccaaggtcccttccagctctcacacgccctggatgcttccctcccctttgtgccttcagctagaaatggtgtgtgtattctaatccactctatgtggaagcaccatgtaagaacgtctgtctgagttccctgttctctcccagagcaacaaacagccttctgactgtggggtgcaatggggttgaagtcaactccatcagcatttattgggcacccactgttgttcattaattcagccagcagatattgagatctctagtgtgctagaaatgtcaaacagaggctagaataaaaagcaccacccatgcccttgagaggttcacagtttagaggcagtacatgaatcacgacaaaacggactgctttggagtgctggctgtgtgctgggggctttgacaagaacactcgcagatgatctcattcagtcctccaacaacaactctgtgaagtagggcttatcagctcatcttatgagaaaaccgacactgagagagcttaaggaagttgcccaggaagcaggtagcttgctagtcagtgtcagagctgggttcagatccctgtctctttgatgccaggactgtgctgttaaccaaagcattgcaccgcctctcccctgctgtgcagttccatgggctctgccatcacacaggttcctgccatccaggaacttacaggctgcagatgtggaatggatgagtgagtgctgttggtgtgggctggaaaccttggtcatggttaggcgggtagaagccggaggagctacttgtccatccaggaaactcaggtcctttcccagcctccacactgagcatctggaagcttctctgcaagggctcagctaaagctggatttcatgcacctttccccgcagtctgtagacatcccctaagggtgctcactgccccttggagctctcccaaggaaatgggcctcccacaaacaaccatccacagtgggacatgctgccctggctgcaaccagtcctggctcctgggccaccttctccagcccagcccagagctggagcaagcccacctgagtcctccccaagcagtcacagcccttgggatgtcagtcttgctcctcaccctggtctcttccatgttaccaccgtgccccctctgccatccccaggctcatcgggaccttccgcatggtgctgcagaaggtggtagaggagagccatgtggaggtgactgacacgctgattgatgacaacaatgctatcatcaaggtgggtatgccccacggagttcctggactttcccatatggggccatctgggggtctgttctccctgcctcacacatggggtggtctggggaatgcctctcatgcatggcgaggtgtcgcaggaggaggagactcaggtcagactctgctggaatggctcaatctgtggccatggctggaggccctgtggcatggcagggtctgctgccccacagtaggcacccctgcccttcctacggtgggaatgcaccaactggtccttccatttggacccagctcaggagtcactaaagaggctccttttgtcatccaaaggccagactgagccctgctggcactcgagggcatgaccttcactctgcacatctggctcgggtcctccctgggagggcagggacctcatttcctattgtttgtcacatcccagcacttttgcgtgagcacgcgtgcactagtgatgcacagtctagaggcacctgacacatgttctaacaaagaaggaagcaaccctaccaggacagcctggccccaggctctgctctgattcttcagtcctcttgagctcagccgtggccactcatgggcagttggcatgatggtgaggaacagggaccctgagtatgaatcttaggctgctcactaactgtgtgacttaggcaagctacatatcacctcaaagtgagcacaattacattatccacctcccaggactattctgaggattaaaggacaatacacagaaagtacttagcacagatatgcacaataaatctataatattgttagctattatttcctgacctcagtttacctatgtataaaatgggactgtgccatggtcccccagtggggtcctgtgtaatatatggccctatgtagtggccaagagaaacagcctcagaagccaggactgcagccacagggagctagaacagaaggaaccctcttctcccatgggcaggggtggcagggagggcttcttaaagttaccggggtctcagccaccacagcaaggggagaaggggtgcagaataagctatgtatggacacccatgggaaggcgggctgggaggagaacacagaaacctggatgaagagtgtagtgtgggaagtgagataagagaattggggagtgagcagggatggacagacagcacagcccatgccctggattttcagaatcagacttaagatgtcagcagaggaaaggactcacggatctcctagcccacttgccacccatctccgctacccattgttatgaatgggaacaatgaagtcctggatggggaatggattcggccacagttgacagcagggccagcacggagacccaggacttccaatgccagagaccaccattttcccataacaacatacttggttccaccaagagggtcccatttgttccagaaaggacatggggcttggagttaggcagcctgggctcagatcccagctccagtacttcctagctgtgtgacttaaagcaagtaacttaacctcctgatatgctaggtaaggtaggttgcaatgttgaaaagatcaaatgagtgtacattaaagcatcttagcatgatgcctagcacagtgaggattcagaaaatatgtgcacctttcccttcccttgggaaatctaagcctgggtgctggagcatccaagcactgagtgagggccgcctgtctggggcacaggaccaagtcacctctagaccagtgaggaagggtgatccctgtgcactgggggggaaactagagctgcaagaaagtaatggctccaggacgcagagcaggaagcccaatcatgactctccactgctaagcctgagcccggttgagtgctctactttttgccagaggaaaaccctagggcagctcccaagattccctccctctccagggtaggaagggtgagtgtgagcctgggccctgggctcctctcccggaggccactttcagctcattctgtccatttccaacaagccgatttctggcgggccgcgcctcatgcctgcaggcagcccttgttctgaggagaggaggtggcctgatcatggggatgctgaacgacactctcggttatgtagacagtggactcggggggtgagtccaggctcagttgtcctgggcaggccaggcccctccaccttgagcaccagggaggagtggaaccaccagcagcgggacctggagccaggtaccagtaagctgacccggtctgcacaagtcagcctttcagagcctctgttttctcatcagcaaaatggggcagaggggatcataccatcctgacctcctccagtgaggcaagggtgtggaagcgctgtgtaaacaccaccaagcagccacatatacggggtggagattgctgtcaccatcccagctgctcaccaccgcctccctcccttcagaccagcctgtgcgtggaggtccggtatcaggccactgacggcacagtgggctcctgggacgatggggacttcctgggagatgagtctcttcaagaggaagagaaggacagccaagagacggatggactgctcccaggctcccggcccagctcccggcccccaggagagaagagcttccggaggtaacaggcaggacccctctggctgcccactgctcccaagacacggggaagagacctggggcctggtcctactgacaggcctctctaggcctagctgggctcagagtacagggctgagcttctggagagacatccaaggggtgggaagatgtttctgtagccccccacccagccgtccacccccgaggtcactgggcagggagcaggagactcagatggagctgcaaggccaaggcctccccagtggccctgagggaggtggagctctaacacagggatggggctagatctcctgcctttctcagagaaggggagttggggataggagggcccctggcctctctggttcaagacccagcagtgtccaccaggtgccggcagcctgacctctaccctggcccagtgaggaggcccaagagagggcagctcttcctgccagagtgaagccaaagatcctggctgggccctggcctttcttcctcttgagaagggagggtacccgggaacccccagaatccagcgtcacgccctgcaagtgtcctgccacctatggatcacaggaagctggatccaggacagctcattccacgtgcactatttttacaaaacagaaaatgcaattgtattactattagagaccaaggggacagaatctgggctagtctagtaagatgttgtccatgggttcctaagtcactaggaattatgtgttaaatgccagtaagtcaagggtgcatctgaaggaccagggtgtgttttgagaagggaccctccgtgccactggaaacatatccctgtaagctccttccacgctttcctttccaagtaaagtttactcagtccctctgctgaagaaaccataggttctaaattagtgtaattgaactgacatacttttatgggacaaatatgttttctcctttgcacttgaatgagttcacacccccttaagcacccctcacacacaggtgcatgagtgcacacgtgtgcacatacacatacacacacacacacaagcttcagaaaccctgggagccagatgagtaatagtaacaaggtcaaagtgaccaggcctgcaacaaacatggcgggactgtctactccaggccagccacgggcatggggcagccccaggctagcttaaagcctgtcccctcagactcctggctctttagcagaaaacccaggcctgagtcctagctctgcctcttactagtcgtgtgacccttggcaagtctctgaccctctctcctcacctgcaaagaaggacatagcaaggaaatccccctgccctgctgctgggagagccggagggatcacagaggaacaggtggcaatggaggtgctgagcgctgcccatgtccaggctggtgacagacaaacaggtttcttgtagcacaacaatgcaaagagtcaggaatcgggttggaaattgtgagaagaggagcagtgctcagacggggagtgaagggatgctgactcagtgggcaccacctggtcctcctcgactgtctccattcagaaaagaggttggcagggctggtccagaaaccagaagccgggctctaagaaagagcttccagagaacaagatcggaagccacacaagggccatcagtcacagggaaaggaatgctgaccccaaatcaggagagctaaggcccattaagtcccatcttgactgtgccactcattggctgagtgacactgggcatgtcaccagcccctgtaggtcagtgacaggaatgggttcagcaagttacatctggctcccctccaactctgaggtcctaagggacccatggatgctccggacctgtgggtcacatccatgggaaacaacatcctgggagcccttagcagccacgaaggcaacctccctggggtggcgtagcaacacagagccagtttctcactcagtcctaagagagtgggccagggtgctgatgggggctctggagagcttagagtcccagagagccctaggcaccaggaatctggagataagagggctcccccgacccttcctcacagcctggtggcttccccacctctccccatcttcgtgtggcccctcccagggtagcagcaagaagcgggagcaaaaggaggggcttcaccccggactgggaattgggagagggtgacagccgaagccaggcacccccaccctgcattgcaggggcagtgtgcaggagcacagtttccctgctgccactggggctgccagcccaggtttgagagcacattggggacaggcatcgctgctacaccttctcccgccaggcctagccatgcagccagcaggcctggttgtggaaaagaggggttgagaaaaattctagagatgggccatttgctggtgaggagaaggtggagcgggttcaagaacttggggttttcctgtagcttaatcctggctgcccatatggggccattgagttctgggtcaaggagtgctgaggtgaggagggggacctggaagctggccccgcagccctagatgttgcatctcacccttgtcacatagtgtgggttctgggaggaagccagagagctctccagaagggacttggccaaccttttatcaggaaaacacctactccttaaagaggacaacaccggggaaggggtgtcagtgcctcacctctgaccccgttaggagcccaggcaggcttcccctgcatctgctccctgccctccatcctctcctgggaaggccaatccccttatagatcagggtattcaataaccacagttccctcttgttcctgctttagccacaatgagcaagaggaaaatcccgttgctggcaagcagcagtgtctcaccggccatcttgaccgttagggtccggcgtggggatcagccgctccctggctgatggggtgaaatgaaggcctgctgggggctgcggggaggtagactgagtgggcaggaaacagcctcagcccagacaggccccgggcagcccaggctggaatcttccacggatggaggggaggctgatgccaggagatcctctgggcactcctcacctctccctccagggcctgggtccaccccccagccctgccctgcctggcctgcttctctgggacttcacccacattcatcctgtcctcactctgggggtcagatggttctaagcaggggcagtgtggacctcaggcctcagctgctgtgacactcactcctaagaccctaagaatctgccatgaagttaccccgttcctcctcagggaatcagtatgggggctctgcctgaatgaccaccaaccccaccgcccactgactctctgccccaacgattccacctcccctaggccctggtcagccgcatgccctctgagccactctgcccacttctctagttcctgccacgaagccctgatttctgccggctttttgcacaatgcccccggtaatgtgccaggaagctgtgctgtgtgacagagcacaggctccactcacagctctgctattgggaacccccctccccatttgtgagatggggctcaaggatgcctcacagaagtgccaggattgagtgaggtgcacctgcgagtcatccacccctgtgcctggcatgtggcaggtgctcagccagtgttcacttccttcctcttcactgactccatgttaccctgatgtcaacttctaccccgagcagcacctgaccctcttgttcaggtgctgtccaagcaccttctcagctcttgctccccaccctataccaagggctctgcagaagctgcccacacaggagccttactggcccaggggcaggtatagggagctcatttactcaaagttcccctcacctccccaggctctcagtgttgcagagatgtaatgaatccctaacctcatgggcgctccactctcagcagcacaaaatcagtgttccagacccttgcatggcagcgtatgcctgccctagtctctggagagaaagtgacttcggccctgaccacactcacatgcacacacatgtgtacacaagtgcccatgtgtttgcacacactcacatgcactgcatgacaccagggaggactctggattctgggctctgctgttgatgctgtctttaggagtcacatcttagagaggacaaagaaagaaatcccagctttagtcttgcagctaaactgtagagacctgagcctttcctcctgagtcccagtattctgcgactatctcctcttctcattttctccacctggcctggctctcctgccctccacgacccccacctccttctgctgcccaaaccctcttctgctggtctcctctctgctgggtctcatctgggaggagtttggggcaggagccacttttctcattctccttattgatcattcttccactccagtggaggcctgcagaagccaggtaacttcctcctatgctggggccagagggcagtggggcacgtgtgcatggtggggctctgagacagaggggcagagagtgggcatgcagaagtgtgtgcatgtggggccagtacatgcagccttaccccaagagtgtttttaaatcggtttccacagcccctagagagctagaaaatcctctgctgccttccttctccaggctgagccccagagttgcagcagctcccaaagctgctcagatgagccggggcagccgggcgcactgggattttgtgcttgagacacattcctcctcctatgctgtgagctcttctccgcttagtagtctcagctgatgtgggcagccgaggcctggctgatgttaacacctttgaattacagactgacctgcttgcccaacgtaaaggttagctggccagcgctggactgcagctgtgctgtgtctaggccttcaggtcttgagccatcaggatatgcagtcaagtctacctgggcaaggcctgtgccagaacagggtgtgaggagaggaataatttgctaattgttattcactttcctgtcttcatcctcattgccacagcactgggaaagcattgagagaacattccagaaaagttttctggaagcctccctaaagtgagataggggggccgtttttccctgctctgagccctggagtggtagctcacttaccgccccacctacacccctagaactgcccccaaccacccgtgtgcactccatagcaggacccccagccctgcctcaccctcacagagcaggcttagcccactgttcccctagaggcccccagagcctgggagctcccaccccattggaggggagcaggggagcaggggagccggtgggcagaggagcagggtggcccaggccgggagggtggccaggctcatctaaccctgtgttccctgaggaagctgcgacccacattgtggaatcatcagatcttagcctggtaggggcgatgagctgaggccctgaggtatcagagcttggggttggaatagtggccacccaggcccagcactgtgggcccctcccatctcccccaaggcagaacccagggccatgggaccccttttctgcagacctaggcttgctaccgtgcgaagctgtggggtgagaggtctgtgggacaaggaggcccccggggagcgtgcaggcccgtggggccggggctgaggccagtgtctctggtccacagcccctcacacgtgtccccttgtctcctcatttcttccccctactcagcaaaggcagagagaagaccaagggaggcagagatgacgagcacaagtaggtgtcccaggcgagggcagacgcaacagcgtctctggggagacagaggcctcctccccacaggctgtggagggcgggatgggctcggctgagagggctcaggagtgggctgtcgtggtagagctggcacgggtcatggaggcccagggaggccttttcacctggccacgggggtgagggatgaggaggggttagggtcgcgggggaggtggccagaccttctggtttccactctgggctctcgggggtgaccatcctcctctccgtgtcttgttcctcctccactgttcagcccccatcctgtggccttcgggcttccctgggagggaggggacagctaaaggctaaggggagaggggcatgaggacctcagggatccctctcccaacaggggcgaggtagggccaggcagctggaggcataaggaggaggaactctgggtaccctttgcagctgcaggtcgtgggtggagttggagacccccagaaagcttaggagaggccaccatttgggcggccctctctatcttcatctccccaaaaggcttcctggaaaaatgaggtcagggtgctgtctggagaggacaggagaagggtcctgcaggtgggaggggctggtcacaagggtctggaaagattcgaaggctgggagttgtgaatgggtcttgtaggcacccctagaagcacactgacatctggaggactctagcattacgggatctcataagggcagtggtagccaaggtggaccatactggaggaggcctctggttaacacctgctcttacagatgacaaatctgtctcagaacaggggcagagctggaaccagaagacagggaagctgacttctgacccagagctcaccatagacccaggaaatttagagaacttgactgtatctaaatttaatctaattctccaaacataccaatgagagctgaaaagccaggagtgtggtcttttttatcttccagataagcaacctgagccccagagatcttaagagatttgctcaaaactgtggcctcaatatattaagaattagttcatctgaagatatcatggaaatatcaggattgtgtgttgaggggtctgaactgatcaacactggtgtgggcttgggatatccactggcattaagatcctggggaactcacagcctcattcattgcttcaaaaaaaggtatgagttctaactcgcatttgttacgcacaagcaaaagcaatgatgatgcagtgttaactctgtagtgatggaggaaatggcgctgtgtaggaagagctccagcccagagacctgaaggatggaggagtttgccaggttcccagtaagggaagacacgtaggcagagcatgtgtcaaggctcagagccagggaactgaatccagggtgggtggcgatgatggggaatgctgagctggggagtcctcttagggagtcctcaagggttcaggtttctccatagatgcttagatgtaaagggcatatgaatgagatacaagcagcctgtccatccccagcttctctgcctgagatcagcgatgctctaaggcccttcttgatgcccagcttcccagtctgtcccaggccagacccacagggacacagactggcctgatccctttgactggctacagttggagtaagaggtacctcacagtgccagcacatagtaggtccaccaaaatactggtttcctagcacttctctgtcctaatttcttaccatctctaattagcacatgagataaagtaaactggcatatagtattgttattattattatgtgtagagcaataggactattgaaagaataggaaaatgagatttctaagaagagattgaacaaatttaaactctttagcctggaggagagaaaactgtggagacagatttcaatctctgaaatgttaatgtgtggcaaagctggttggtatctatctccactgagaagagataaatggaaataaatttaagttgaagttaagttgaagtagagaaacaagattcaacccacgaaagaactcatagtgtgtgacattctgggataggctggtttggggagatgagaaaacacccatcatcttccatgatgctgcttgcttgagccttgcaaagggctgggccgccagcaagaactgaagagccagcttccctgacaatcctggggtcaggacaagtgtgtgtgggtcccccaagccttctggtacaacgtgggcacatgtgcaaacgggccagtttggagacagggtggttcttgtataaagggtcagcctatcctgcccacctatggaaagctattcaaaaactaactgacattcaacacactttcaaagacacctgtaaagaccaaaattatgaaattccctgtgccttggggcatggaaaatttttaaaataaacccatttaggggcgcttggataacatgctccgaggttttgaaaattgggctgtttgagcaatgcaaagaaggaccacagaccctatttctcatagacaggagtctttatcctgattgattacctgaggcctgagctaatgagcctagtagttccagttgaagccagtcatggggcagaagccctgggcagtgaatggactcgacctgcagctcatttatggtcaggtctctattagctttcagaataatccagagacctgaattaatgaaacactcgggtcactaaatttagtttggtgaatgttcccaagtcattatgaatactaagctctacctaggaccctgtgtgcaccacacagcaacacgcttctaaatctgggccataaaatgagcggagaaatcatcagatttatagtttacaataagtgaactaattttagcatttttttcctctagagataaataccagtctagattgtaggtgcatttcattctgaccatggtgaatgtagccacaggaaactcaaacggattctaaatcctcagagggtcctgggatactggcctccccttggctctcacttctcaagctttaatacgcccaagaataaggagccatttgattgtaaagtgagttttcactgagttgattattggcttgttttctttgtctgtttctcaccatatcctgtttttggtaattgtagaactcaactagaccaaatgcagaattttactttgaaaacaaaaaaaggccaggacaacggacacctcaacagcaaattacattttttgaaatctaagtctttcagacaaatagataatcttcaaaattccctgattaagttgacatttatttcaaaactctcctttacagtttgccaagagaagtaggcatactgctttctgggaactggtgctgcaatcaggcagaaaggctttttctatagtgaacttctgatgtgttactgatcagaaaattacaaaggctagtggcagtgatgacatcatgctgtactgatcacaattcagattcattgaagagcaagtctaggagaatcagaggtacagagcctgtagtaagaattctggaaattacatccttcactacacatttctgcatttttaataaagggacaaagacaatatccttttgagatattcccaggcacacaggagtgctaccagtactaccacttcagacagctaaaactatgcagggttggaagggagagatttctcctttcaattgcttcaaggtgtagtagagatagttggacaagtatagtttttgtttgtgtgtttgtttgagacagagtctcactctgtcgcccaggctggagtgcagtggtgcgatcgtggctcactgcaacctccgcctcctagttcaagcgattctcctgcctcagcctcccgagtaactgggattacaggcatgtgccaccacacccagctaattttagtagagacggggtttcaccatgttgaccaggctggtcttgaactcctgacctcaagtgatccacctgcctcggcctcccaaagtgctgggattacaggtgtgagtcaccgcaccggaccaggacaagtatagttttttaaagcctcaatcatttctttcaaatctgtttgtgttaagaaataaagtgactttcaaattcaagggccataagtgccccagggatgcctcaggtccttttccacctgggtgagtccatgggaccagcctctgaaagccactatttcttgctaccttgcactccccccgggactcaggcagcagggccagatcccatcccagcaggccgggcagccggcttctccaggcagggcctgcttctaacctaccatctcagagcacttcccctctggggaagtggggaaggggcaggggagagggaagtctgtggctggagcaggctgcaatggcaaaggctaactatgtaggtcacacatgcggaagggccaaggactccaagaataacacagcctaggaatggccaagaagtaatggtgcaaagtcaaacgctgagccctgcaggagactcctgggtaattcaggagagacatagttgagcagcacggctgggcaaaaaggaatcccaagcactgagacaggaagtgacccacgaggaggcccacaaaaactacacttctgaagctgggcctatggcaggggtcaggacagccagcacccctgtccttggggccagcaggtggggcaaaatcccacaggatgcttcagggcaagccagccagggtggtcctttccccaccatcacacgattatttctggtgggttcattgatctgttcaatgttatgtcaccagcaatttaacatgcacagcagtcccttcccaaatgtttgggtgctcaggttctttttgaatgagccccttctttgtaaacatgggtatgatctgtgagattccacagatgacagcatcctgatctgtaaactatgctggcacacagaccatacctgtacctatgggtgccagccctggggccttttagctaaaatcccaaatggtcaggaatggatgggattcttgcccacagaaaagtgcagtcctacggcatcgaggcaaaggacctgagatgcagtaaaaatattgctggcctagaacacaggagctttctgcttcaatcccagttctgccactcaccgtgtgacctcgcgattattgtcccctctctgagcctcagtctttttattggttgaatgaggagaagtatgtggccctcagaggattgccaggaagatgaaatgagcagacatctgcagacattgcagacatctagaaaggcctttggccctatgtagtctctttttggcctgtatgtgtgtgtgtgtgtgtctgtgtgtgtgtgtgtgtgtgtgtaactcacctcccccatcagaagggaggaagcttttgaaaataattccaaaggcatcagctttgattttagagcctctttctttccctttcttctcattgtcgtatttcagatggtatgctactgaagagtgcagacacatcagccttcttccattcctttttaggaattcaaagaacatgctaatgttccctaaattgtgagctgctgccacgtgaaaagggtgattctcaattgctccctcactgggatatgaacgtgctttgtcctgcatatgaacagtaaagaaaggtcctggggttgggatagggccaggtttggggaataagattggccccacaatcctgaggagaggggcttgaggtttctaggtcatctgcctgaggacagaaaggttttccccaacctcctattgcccagcataaagaacaaggatctggggtcttagaaaccatagtcaagcctccacagggagatgtgtgacccaaaaagggtggactctgctgtaagcgagctccaggttggagcctacacctggctccacctggacctacaggatgatggggccatacccaggaggagggagaacgggaagtggagagagtcaggtatccactcatgcaatatggatggggtaatggaacactgcactttaccctctgctgatcctgctcctggggcttcctggtgccaggaaccacaggctcggctgcagggacatcactgaaggacagtgaggacccctgccccttttcctcagccccgctgactgcaaggcccttcacctgggggcacaaggtcgcagcaagccagaggaagaggtaggaactatggagcctgccataagttcctggggttgggggaaaggggaatttggcagtgagaggggacaggtagaaggggcaaaatccaggaccgaagatagatgggaaagggcctatctccccctttttcatggggaccaaggagcatcccagaacacggagaggttggagaaagacaagtcaggctttgagcaccagggccatctgagaactgaacagctcgtttcaaccacatctcccatctcctcatcggcctctgcccctgagtcctctctggtccctgccccgccgttctgatgctctgtctccagtcctcgggctttctctccaaccagctgagccggggaggatgagcgtggggacactggcagggctcggagctctgaggagactagactgaggggctgggatcagactgaaaagtccaagacccagaggagctccagttaaaacggctctttccggctcaagaccacgttccctgcttgctggggaccccatccctctcctccgtgtgtgaaaggatggcaaaggcggaagtggaggggtctctcactgccctgattccccctcctggctcccaatttgggaagacagatcccgatctgtctcgggaccagtaggtgaggggccgggtccatctcccttctctgatgtgttctctcatgtttggctcttctgtgtttgtgtgttttcctccatgcgtccctctccctgcacctcattctggtggcccccctcacagagccgggaggagcgtgttctccgccatgaagctcggcaaaaaccggtctcacaaggaggagccccaaagaccaggtaggacaggtgccgcgtgagccccgcagccccgcgcctcgcggcgccctcccgccgctttccagcccctgcccggctgccaaaaggccctcctgggataggtcgtcccagggccaggccccacccagtgatgcgtggccctctaggaaggagacgccctagggccgagggagggaaacgggcagcgccctctgtcgggggtgcctggttacaaggctcctcccgccctcgttgctcccggttcttccttcttcacgcagaagcccagtgttttaattagagcagagaatatccatcaagaaacgctgtttggccaactccctatttctggggggaaaccgttgtcccactagtacggggtcggcggcaggcctcgcccaagcgctctcaccaggctgcagcctggcctttggggaggtcctggggccgctggagggcgcggcagggccgggcctgggaggctggagcagcaggtggcactgggccctcccggaggagcgactggagaggggaagacagctgctgcagaggaggcgggaggcctggaggaagacaaggggagaaatggagaggacaggggagctgggagggggccatcttctccatcacgggcccaccatcggggctcccggctgccctcccccagcatcccctctgtggcctactggccctcaggctctctcccccaccctcttgcccccatgccaattccagccgtgcccttcaccttcttaaatggagagagtacagctgctggctgaggaccaaacccagcatccttgggtggctgttcggaatccacatgtctgcatctcattagatgaatacacaccaatgcattaggttctgaattccatcagctgtttgatatggataagttacttcctaagccttcgtttctgtacctgtgacatgagaataacgcccatcttggcagggcacagctctaaggactagagatagtcatgtaaagtcctggtgttgtgcctggaacagagagtatccacccaacaaatggtagctatttattgagaggtgcaaaagtatggattctttattccctaccttcttccataagagatattcagtgcctaagtaagtggtatacaataaaagagcattcaattaaaataaaaaggcaagaccagacataatggccattcaaatccaagatcgggattaggtagaaaaacactgcagttattcaggccataatattctaagcggtagcaactaagtaaacctcgaatttaactctcagctttctggatgccagagtaaaaggagaaatggtcactatctcaccatcagtcagcccacctaaccagtctttcatcttccccagatgaaccggcggtgctggagatggaagaccttgaccatctggccattcggctaggagatggactggatcccgactcggtgtctctagcctcagtcacagctctcaccactaatgtctccaacaagcggtgagtggacgggagccctgcaaccccagctgcccccaccctgtcaggcaggacctggcttgccatgattggaatttgggtagggaagaatcagggctcatggacggcttcttcctaacctaaccttacccttttctgcttttccttgggtgtttttctcacctctctccctgcaaaagcagagcacagcagctgcaggcctgttctcaggtccttgaatacctcccagcccaaggaagccacagacctgcccaccccatatttgaacctattgaccccatgtctgtctctctgttacttctgcctttgattagttctctgtgttgaggcctctgaagacaactaatcctcactattcttggcagtgcttgagtgtttaaagaccatgattctgtccctctgcccactcccaggtctaaccactgccagtgtcctcctccccaacaagcagtccccataccccaggcctgatggtacattctcttcctcagatctaagccagacattaagatggagccaagtgctgggcggcccatggattaccaggtaggtgggcacctggaggcctcatgtctttcagactctgctctagtgggggattctagccggatgtgcattatccactatactgaggcatggatccaggggtcatagagaacaacaagctgaatataagttcccaaagtaagcttgttcctgggaggcattcctagaagtatcatcagtagagagatacaaacccaaagaaaagcttgagaactctgcctatgctaatcaaagcccttccagtatttcatgttcagtattggacttcataaagtgagaagcacctagaaaaaccataaagagaccaagaactacaaaaaagtattcaaacagttaaaataagggcctttgaagaaagttttcctggcatgatttttaaattgttgttttgtattatttgattgctggaagtaatgacgattctgtttatctctggatggtgagactgtgagtgatttttttcttctttttgcttctctgtattttctgagattaacacaacttttttatttgtgtgcttctaagaccagagacaaaagactgagacaaagagaggttgacagctgtaagaatgtgaatgtggccaacagtgcaggcaggacaggtgatgagcatgtctggtggctgctgggacaccatctctcaggaagggcccagggaccctccattgctccagaccctcccttggaggctaacaggactcagctataaatcagaagactgctgggctttcctaggattgagttagaatgctggctgctcagaggggacagggcttgcaagagatctcacctggctgccactgcacttctgtcctggggatgttcggtctgggtatcagcaccaggccccagaatcagagtgagccccatctaccagggtagagctttatctctgatgcctagttccagaccccaagcacactaacccttctttacggacaaccccacctcccctcactcaggtgatgatggaaaggataagatggcacttttctatgtaaaaggtacatctggccatgttttctccagaatatacttcatctcccttcatctttgttttagttagtttccatctactcaggcaactgtcttcccaggtgcctgaaaaacagccccaggcaatgtcaaacggacctgcccctgtggttttaaataacttcaagccattggattccttaggggtttgagaatgccggcccctcacctctgccaaaacccaaacacaaagtgtcctgagacttccgagggcttttccaagggattgggctcagggctttgtttctctgtgtgctgagaactggagaattccaaagaacaacgaccccaactcaggtatcatgtcactggcctaagaggtaaggacacatcaaaaatagagtcattattgttcatgaaacttatttttgaaggtttattctatgccaggcactgtgctaggagctatatatgtatttccattgaagttaatgtaattcttcaaccacccaaatataggtgttactgcatttataggtaagaaagtgaggccccaggaaggtcaggaacttgtcccaggtcgttgccactaagttagccaaggttagagccagggttcaaggccaggggtgtctggccatagccataagagcaattgacttctctatatcaagccttctagacagctgctcccttcgggtccctggttcatcttcatcttgctacttagtgcttgttttccaaaccttttcaaactgcctcctaccagagacttttattaactggaccagacattgtcccctccaaagactttttaaaccgaactgaacaaaacggttgttgtatttaacctggtagcatagtgtttcccgacaagttcattcacaattaaccttgcaaacatttgagtgagagctatgaggatgcaaatgtgaaattattttcacttccaatacatacagtgtataatgcaataaaagcaggccgggtgcagtgactcatgcctgtaatcccagcactttcagaggccgagatgagtggattgcaagaccagcctggccaacatggtgaaaccccgtctctactaaaaatacaaaaattagccaggcatggtggtggcgcatacctgtaatcccagctacttgggaggctgaggcaggagaatcacttgaacccagaaagtggaggttgtagtgagtcgagaccgcaccactgcactccaacctgggcaacagagggagaccttgtctcaaaagaaaattaaaaataaataaataaataataaaaagcaataaaaccagatacgacttcactctcttggagactttgggtttgatgagatataaagaccgcaggaaggacacctcgttggtgagatgtggggagacttagctgaactcagatccaggaagggttgtgagggctcaggaccattctaaaggttatggcactgaaagaagcctggaggtaaaaggaccgcggcgtacccatgctctttgtttcttccatttagaatgcacgtcacgtgtaaactctttcctgattattgccatctccaaggcaagaaaccacagtcacccccctgtgaatgtgcagtttccccaccagagtgagcaacgcttggcacttggcagagatgttcttggtggatcaaggggtcttgagtctctttattaccatctcttcctggcaccaagacttaatacattgtcacccaacatctctccagttttcacctccatttcatgcccctgccactgacctgaggtccccagcctcaactgcatggttgtacctactttctacctggtctccctgccctcatattgcctcctccactccaaactccatgccaccactggagcaaacttctgaaaatgcaaatctggtcatgtcacatctctgccacctggaaaagtggggagtgggtaatggatgttgcagaaggacagtactaaagggcgcaccaactctcatctctggctcccagcagatgttcctgaagctggatcaggtccctgggaagcaggtcacaaagcattattactctcgggttttcccaggacaggggtatagatttaccactcagcattattccttgtgatcgctttcatgaagccactggggagtatgtcccttatcttgaaaggagatggtggaatagtcagctggtcagttggtcccagctgtggctccgtttgcctcttcatcttccaccctggaaaaattgagtcctctgctgatgattggagagaaggatggccaagcccctcccccagaaccctggagaatgaccagccattttttattttttatttcaagtgcatcatttccccttcctagagccccaggaggggtgggaggcagcaggaatggcattccccttcccccaacaccatgcgcctggtggtctttctccagcgccctcagcttcctctcggggctgcccttcaaccagcaatgagcaccctctggagcttctcttccctccgttgctccttcaagcctctgcccaccttcccctccaccctccgcctctactgccagagcttctgcccaggttgtcaccttcactggctctgctacatggaggaagggagaaacgtatgaggcctgaaaagggggacagggagaagtagcctgtcttatggccatgcctcgagatggaaaacataaaaaccaaccactctcttggcagtgggaagaggacttgctgctggcttatcttcggtagatgccaaaactatgtctgtccgcttcccagtcctgagttatagaaagccttttttattgttggtgggggcattagttgtggaaaaattcatggggtttttaaaaatctttggcaaaaaagggttcgtggaagttaaaactctacaaactattgtgcaaagaaggacttctagtgtccgtttgctctcttcatagtaaacttctcagagctaagttagttagtcctatttcctttttagctccctgaaggagcagtgaatattgaacttctgtgaagctccagattctaagcttttacttccgtccctttgtcacttcacgttccaaacggaaatgtttgcttcctagttcaagtgtcacttcatttgtaaatatcccctttcctggcaatgttctcattaacattggaatttctatttccttaacatgattacttctgatgtgtagatttttaatcaccctcaggttatttttcagactttgatggacactggatgatcattttagtggttattctttttcatggaaagggaagataattctctcaagtaaagtcgtatttagaagttgcatcaaagcacaactaaaatatgaaatctccaagatgacaggcatgaaaagcaaccttcggagtcgcattagaagaatgtgccgggctcagtggctcacgcctgtaattccagcactttgggaagccaaggcaggtggatcacgagggagactgagaccatcccggccaacatggtgaaacctcgtctctactaaaaatacaaaaattagccgtgcggtggcaggcgcctataatcccagctactcgggaggctgagtctggagaatagcttgaacccgggaggtggaggttgcagtgagcctagatcgtgccactgcactccagccggggcaacagagtgagactctgtctcaaaaaaaaaaaaaaaaaaaaaaaaaaaaaaagaagaatgtacagaggtccatgcttattctagctggggaaaggcttttcttgttaaaacacacgtttgagagaggcaagtgaatcaatcattctaagtatcatgcacaagctccctacttgagagatcaaccgcttagctgaagggagattctgttggggtcactcacattttgtagagctttctgctgtttaggatgcattttgacacacatgatctcatttaacctgcatacaaccttacaggtagctggtgtctctgcttgtaactgaaaaacacaaggctatgtggtcatttgccctcacacctggcaacatgtcaggtctggggttcaatcccaagttcagcaacccccagtacatgcctctgtctatcttaacatggccaccctgacaggaactgacacctccaaatccaaatgagacctgatggcttaaaatgagggttcgggaaaagtagtagtgatgtcaaaaattactggtgctctggctctctctctctctgtctctctctctgtccttatatctttttagcttaaaaagccaataattggctggtcacagtggctcgtgcctgcattcccagcactttgggaggccaaggcaggcagatcacctgaggtcaggagttcaagaccagcctggccaacatggtaaaacccaatctctactaaaaaaaaaatacaaaaattagccgggcggggtggcatatgcttgtaatcccagctacttgggaggctggggcagaagaatcgcttgaacccaggaggtggaggctgcagtgagctgagatcatgccactgcactccaggcctgagtgacagagagagactcagtgtgaaaaaaaaaaaaaagccattaatcatttgtggtaagctccacaaggaagaatttgttgcaatcccacctgtgcctggctccagcaggtttccaggaaacatttgttgcatgaatgaacaactgaaatagggcttcccaggatataagtaagattgcagagctggacgccacataaaggacacagcagagtgcacacaacatacaatcagtaggctgaaaaaggcggctcaggcaggcaccaaagccgcactggccatacaaacaaagaaattcagcaaacaatgtggaaaggggggggagccaaattccagaaatgcaaagacgtatcagaggcctgcaggcttacatgagaattcctggagcaggaaattaaatgcaagttaatgaagactttgaaagctttattcctgagtgcatgaaacctgtgacatgggtttggcagctctttctgaagcagagccatcgacgctggggaagaacgcagggcacttggcatcacctaggagctttaaaaatacagattccagcctgggcacggtggctcatgcctgtaattccagcactttgggaggccgaggcagacagatcacttgaggccgggagtttgagaacagcctggccaacatggcaaaaccccatctgtataaaaaagacaaaaattagcccggtgtggtagtgcatgcctgtaatcccagctactcaggaggctgaggcagaagaatcacttgaacccaggaggcagagggttgcagtgagccgagatcatgccactgcactccagcctgggcaacagagtaagactccatcaaaaaaataaaaatacagatgcctgagctgcatgtccaggattggattggattggtctggaggtggcctgggcatcagtgtttttaatgcctctccctcccttcggcccagcaagttaagtctagtgaacactgacttagaggttagccaactcatactcctctataaatgaagacacttgaggcatagaaggagaaagagccaggatcacccagcagatgagaggcagtggtcagaatggagcccaggaggccagtgctggctcccgggccctccctctgaccctgctgccccagcccctggacccctgcgggaccaggctcctaggctcaggcagctttccttctggctcccccttctcctgcctgcaggtcagcatcacggtgatcgaggcccggcagctggtgggcttgaacatggaccctgtggtgtgcgtggaggtgggtgacgacaagaagtacacatccatgaaggagtccactaactgcccctattacaacgaggtcagtggccctgtggggaaaggagcctctgtaaatatggcaggagggtggccccagccctccccaggagaaataggagtggctggaagtcaaggagcacacagggctaccagcaggggtgatccaccctgttacaacccccaggacactgacaaacagagccacatcttctgaatcctctgaaccccccagtctagagcacaggccgacactggtctttgaagcgtacaccacccgggtgctcctgggcagaccccagcagtgcctgtgaaagaacccccccccaccccactccccaagaggcctggttcccactgtttcccaggccagagcccaaggacagggctgcctcattccaacccatggtggcactggcaccattagtaagcactttctaccagccaggcatgctcctaaatgcttctgaactggaccatccaaagttgtcactatcaattcccttttacacaaggggacagtgagacttctgaaggcagaccttgtccaacctcacagtgccagcatcgcccttggcgtgctagtggggttctgccctcttggctcggctccttcatggttgcctaaacttctgcgggcttctctccagagcactggccttgattttagggtgtgaaagagaaaacatttggtacccactcctattctttccagccatttgaggccacatcaagggtgagggacctcagagaccttctactttaatctccccatcttacagaggaggatactgaggcctccatatggaagggccttgcccacaatctcagagagtgttgctgatagagcaggggccaggctgcccacccagcttccagcccagggctctggccaccatcacaaatatggcaccttggttcccaggctccagatgggaccccatcataatcagctctggggagggatgtgagaaatagagaaatacactcactcatcaaaacccaaagaatgacttagaggcatgaagaacagcgaaagtgagacttttaataacggtcttgcaagatggagtgtctggtaggcaggcacccctggggcagtcacaacaggaatttatctcctagtgtgcaagtccctcccccacttccccattggttgagcactatggggttacaatcttccctgacgtcgcctaagtttcattttcccccttacaaggttataccccgctccccttcgatttccccacttaagtttcgatttcccaataacaaaactttcttccctttcatgggctgacccctcctctacattctgttcgcttattgtgtccttctaggtgcatgagccgtgtggtttgttgcattcgcaggttggatgccagtacttagacttatcctgccttgaaaatggaccattgaaaatgttttctcaccaggatgcccaggcctttcccagatgcctgatcacacatcagactaacccagaagccacaggcctgggccctgccatccctttcctggagggttccccagtctgtttctcctggtggctccaggcagtgaggggtgccaggctgtcccaagtaaggcagctgagtcccgtaccctgaggtgggtgagggctgaggtgccccctgtagcttgggggagggcatttctcaggcagctctgagagtcctcagactgtgcacctgcaggaagaaaacccaggcccacctctgcccttcagcccaggcctggccgaactctcctttgtgaccacaaattgactctgctctcccagctgctttcccacaggccccccgagctggacaacctgctcaggacccctccagccccaaggacattcaggattgacatctctggccttacgttaggacacatcctgactggacaagtctccgcctagataagcatctatgtccccaagacaggcatggagacaggtccctgtggccccggtggttacttgatagcagtgaagccacttctgctaacttaagggatctccctccaccaggcccacacaccttggctttcattcaaattacttcctctttcccaagggcacagagctgctctccctactctgtggctcccccagaaaactcctactcacccggcagggcccagctcaaatgttcttgctactgagcagccttgcctgctctgtctgggtcagaggtcagcactcccctttctctgcagtgttaatgtcctggagttgaggttggtcctccgtgtctctgtcctgctggtggactggaggctcccagtctcctgcctcgctatttgttcagagccaggcatgtactcggaggggttcagtaacactcacccaaaggaagacacaaacatccactgagcatctgccgcacaccagacagtggcacgtggggcaacatggaggctgccgagatgaaggaggcacagtttccgccctgcgcaggtcccctccttgtttcagcctagaatctttctaaattccctatttacttcctctaagactgactattcattctgctcatctttggacaatcttaaatgtgtttctgatcacatttttgttctttttcacaaacccaaatagctctgattttgtttctgtttcctctaaactagggtttctcaaactcagcactatggtatcttggactggataattgtggtgggatcgtcctgtgctgtgtaggatgtgagcagcatccctggcctctacccagtagatgccaatagcaactccccttagttacagctaccaagtttccagacatgccaaatgtcccctgaaatcgccctcagttgagaccaccattctaaactatcttactatgattccttccagccccaaatcagcctttccagccccaaagctttgtttcccttttcttctctttctatgccacattccttttcaatgaaggacatcctcctcgtcgtgggaatgtattatttctgactaattatctgagctggtaggaaccttcctttggctccattaaaacaacagagggaggtgggaacaatcaacatgacttaggtatctaagctattacaaaaggaaaatatgctcaggaaataacaggaatttgattgcagacagctcagagagttcgggattctggctctagctcagctagctcgctcccctggggctggcacatctgcgggcacctggcctgatcaccctgcctggccctgagcctgcctgtgtgcagggaagctcaaaacctttgcccttccggaacaagctggccattcacaaaccagactaaggctcctttcctgtgtgtcctgtgtgtgcatctggccccgccctgggcatcttgggagcgccaccatccttcctcctgctgaaaatccacctctcccctttgccttggatccttctctttctacagctcaaagaacctggcattgcacagcccaactctgtctttgtttttcttccagccccttcttccttgcctataaggtgttctactccagcatatgctaagtacaaccatgaagacccatgtgtgctcaaggacaggaactaggagtctgtcacctctctctgggcctttcctcattcccacacacttctccagtgacctcctttttccctccacccctccacagtcagaccacttgggttgtcctcacttcctccccccagtcacccctcaatctctgcagggtttctgcctccagatgtcattgacactgctctcctcaaggtcaccaaggacattgctgttcctgagtataatgtccatgtcatcctcctctcccttgatcacccagtttctttcatcccgctgcctgctgctcctcttgggggcccctcacgccactctcctgcttcccctgtctctccagctccatctccccggcctaacttcttggctgaaaggctgtgtcttcttggagccctgacctgggcctgcttcccctcccatgctctccccaggtatctcctccatctccaaggtgtcagttaccatcttgtgctgacgattcccaaatccatatccccacccgcctccccagagcttcagaactctggccagcacaccctgggcctgttagtgtcatgcacagctgtcgctgcttgctatgtgcttaccgtggtgcacacctgtgttaaagacttgaccagggtgtctcattgcaacttcacaaccacaccttgaagccccccaagtgaatggcacccctggagcagttcagcacgacagccctggatcatatctccacattcataggataataggtaaactgaggctcaggcaagaaagtgagtgatctagcagtaacagccaggtggggctggctctgaagctggctttaccctcagtgctcaagggccagcccccagcagccaggagcacgttctcttcggacatttaccccaagcacattggaaatatttctcccttctcccccaccacagttcaccaaagcagcagcccctctactcactgccccacaccctcatcctcagcacctgcacacccaggccaggggaagagatggggactgcaaatgtgcatggcagcccacagcaccaaaggacagtgcacacccatggcatttcacatcgactgccaactaagtgcttggcacaccatggttcatctgctctgaggcttgcgttattttacagtttcacctctctgaatttgggatgtgtctcctaggcagccttgtggcttcatggcaatgtccatgtggcttattaaaccgtagtatatcttacagccagtagccactttagatttggtaaaatatgttacactgtctcatcagagcctcataacaagactctgaggtgggtgtcattatccccatttcacagctcaaaaaactgaggttcagagaatgtgttgctcaaggccacacagttaagaaggtgcagagcggggactagaacccaggtctgcttgctccctggccctgtgcctcttctgagcacagtacaagggcatgggctgtcccacctactgttccaagttcctttcccaccccacactagccagcaccagccccacctaggggatggggctctgcttcctaccacccaccaccagggtcaatcaggatcagatgagttgcctctgctgctcctctgaactttggggctcagggcaaatgtctggggtgcagacaggccctgcgaggagggaggggcccaacactgcctgggctgttgctgctgccctcagtgacagcaggcctggatccttccccctccagtacttcgtcttcgacttccatgtctctccggatgtcatgtttgacaagatcatcaagatttcggtgagtggggagcagcccctggccggcagggccactccctcaaactgcacctttgtgcagacttgagaggggccccctctgtctagacccatgataaagaggcagcgccgtgcctggacacacggctgggcaagtagggacaggctggattctggcccccacccacccctttcattggatgcctctgaatagtgcattcgcccgtaaacagtggccagcaagaaactggcgtgggcaggaggagctgatgctgagcctcagtgagccaccccactctgccaacgccctcccacttcaccacaaagctcgggtcccaccactgccccatggaaagcctcacccttgctgggcctgacgggtgggctgtggttctgcctgaaaggtgattcactccaagaacctgctgcgcagtggcaccctggtgggctccttcaaaatggacgtgggaaccgtgtactcgcagccaggtgagtacctgcgcatggccagtcagtcgaggtgtgcatggctcagggagcgtggtgcacggggcccttcccactgtggcagttcctgggaaaaggctggcaaggaccacagtctggcgactgttagtacacacagccatctggcctgcggagaagtggcgcgcacagtctgtacacaaatgcagtgagcaactgcgcacccagtctggtgggttctcactcataattaggtgagtaactctgcacagagcctggaaggagcttcatcacacgctctggagtgcatggcaggctggtgcatcactggccataggcaggctgaccagtagtggtagaggatgcggtgagggagacccgtcacagcctgcagagaggctgcgcccagactcctgcctcctgggctggcacctgctgagcagaaaagaacccctttccacccctcacaggaccctgccgtccccttttacagttgaggctcagagccagggcttgccccagccacacagctggccgggggtgaagtcaggctgtgtgtccccagagcctcactgagccacactatccaatctgaaagcggtgatgctggtcaatgccagatgtagtgcggcggcctctgagggactctggtctctgaaaacacttcttacaagagccccaggcttttgggcagccatgtgtgctccgtggcgtcctgtagggtaacagcaatggtgttggcaagggaaccccaaggggtggcccagagggcttgtgaggtgggccaggcagaggaagtgcctcagcctgccagatgacagctcaccacgtgggcaggttagggaccaccctgtgtccctgaagtgaatgcactgctcagagtgctgtaatgaccccattaggcgctttgacagtgagaacataatttcacccaattgtcacattgggccctcacaaaacagtaatgtaggcagcagcatttcttcccattttgcacatgagataaatgaggctaagagaaatgaaggggcttagagataccactaaactagtaggttgaacaaattggcgatcgcttgtggttcaacctaagagacgtccagctggtgcacattacaactatgacttagaccagggaatctgagtccaaaaccaagattatacacataaaaatcacaagatcatagaacactcaagctgcccaagacctgaaaaacatctagtccagcctctgtgaagataaactgaagcccaaggtgatgaaggggtttgtccaccatctaggagtagcacccctgtctccagctcccaggccagtgcctttgccaccaccccacacatgccatagccctcagcggagggcagccctgctgaccatcagtgccatggggagcagggaagagtcggcctcctgccatgttgctttccaggaagcatgcatagccgtggactacttgcttggaatgactggcatccctgaggataagctcctcccagggctgagcagtggccctggtaccactggcaggcctgaggccgagagccaagagaaagtcagggggtggagaaaaaggcagatattagtctaatatggacctctgggcttctgggtagtaaagtcctggtgaggaaaccaccagggcatcagtaagtgccagatgttgggctaagctcactgtcccagcaggcctcaccctcacgaccccatataggcatcattcccatttcaccataaggaaactgaggctcagcaggcttaaacagctggtccagggccacattgtgagtaagcggcagaaacaggatgtgggccgaggtctccacttgggtaacctagctcgagatttgctgcttctgctgaatccagccctgagcctggtgccctcccagggacaggagagcctgaagtcacatgggtcctggagttgagacccaatgtctttactctgatatctccagtttggcctgaacttcttgatgagtcgttggttccagccagggcattgttggacagcatgctcccagagacactcctgggtgctgctgggaagctttgggtggtgtcgatatctcttggaactggaaggggtttcccgagagaacctcttctcaccctggcaggaccacattttgtcatttgtaccaccagatgcaacatcaggaaactgtttactgtttgctactctctgttgggggtgaggacgggccatacactcatcctcatagatcatagaggaagtcaggggcatacactcatcctcatagatcataaaggaggtctgggatgcagcaacttccccagctgggctacccttgactggcaggtgtcagccccaggctgaagggaggtgaaatgatgtttcaggctggtaagcatatagctcaggatctcatgtggtccttgtatctctagcctgagatcacacagtattaggactagaagggcctcagaagtcatgagtcaagtgttaacctgatgtagggacccccacagcaccatctctgattggtcctctaaccttgcttagtcctcccagaaatggggcactcactacttcttattttagatatcttcactttctttaggtcatctcaaaatctgtcaccctgtaaccttcacccactttcacacgtctctctttcaggacaaaaagaaaaatagcctttaaatttgaaggtaaattttacattcctcctgaaccgtattctctttctttgctaaatgtccccaattcatctaaccatgcacacctctatacatctacccctgtatccatccatccactcacccacccatctacaaatccatccacccacctgtccacagatccacccacccatccatgtatccatccattcacgcaccaatccatatatccattggtccacccacccacccatccgtgaatccatccacccacccacccgcctgtctacagatccacccactcacccatatatccatccatccacccacccacccatccatatatctacccacccatctatccacagatccatccacctacccacccatccacagatccacccacccatatatccacccatccacccacccatccatatatctacccacccacctgtccacagattaatggctccttctatccagtaatccattcaccatctgtccgtctatctctcagccggccaggcagctcaccacccatccctctgcccatttatgcacccattcattgagctttctgtccatctcctcatccgacacacatctgctctggcaagacctgaagctcctgggattcctgggacatggcccctccctggaggcctgccagcctggctgaggttctccagtgactcctcatccacgtgccttcctgccctctcaccttgcttgtccctctcttcagactctactgtggcattatcttttctgagacacaggtggcctggctattcccagaaaggccaacctctgtacacagcccctaacatctccgggagcccaccagggccacaggcttgcaggacacaggcctgggctacggtagaaggtggaagaggagggagtgaaggagggaggtgctgagtccctgagagttcagtgcccacctaacatcccgggaagcagattcctaaggcacagtgatgcgcttccctttgcttgcccactgggcttaaagtaaacctgaaggggcaaatccttcctaaagcgcctccttccctgacatccgtcctttcctccacacagtcataggtcatgggacactgggatgagactgacaatccctgtctttaggagactctcagtctaaaatcagagccaaacaatacccagatcagcacagtgagatgggaggtgtgcatggagagcacagagaacaaacactaaagagcccaggatcaactcttccgaggaagtcagggagggctgcatggaggaggagagacttgagcaaaatgagtagaagtttacaaattgaatagggagaaagacaggtggaggtggagagaacaggaatgagggcattccaagctcaaagagcagcagatgcaaaggcatggaggtataaaagggcatataaaaccgcaacacctgttcagcaaggaggaacacagggctgggtgggctcagcagagtgagtcagggagcactaaatcaggagcctgcaggccatgccttttgtcttcaccccaaggcactgggaagccccagaggggctgaagatggggagcaggagcatgagcctccacctgggaaggccctgtgtgcagctgtgtccttcacagctatgtgaaggctggctgactggggtggggccatagaagaggccacaggcagaaaaacccaattaggaggaggctgtcgtgcttccaagtcacaccactcatgggatatatgtccatgggcaggccatgcacccactgccccagctccagaggacctcagactctatcacaccctgggctagggacaggcagagctgtggccccaggtcccgggactctagggaccaagacagcatttggttctgccaccccttggcctgccctgagcactgggagacgctctgggtgggggtgtctggtgcagtgcccacccctcatcattgcagagcaccagttccatcacaagtgggccatcctgtctgaccccgatgacatctcctcggggctgaagggctacgtgaagtgtgacgttgccgtggtgggcaaaggggacaacatcaagacgccccacaaggccaatgagaccgacgaagatgacattgaggggtgaggcccagctaccccagcccctggagtctgagccagcccttccttcccccagggagcccccggtgagggtttgctgagagcacctgccacccgtctccctcaccctgctctcgctcactctcccaagcagccccactcttccgaggcagggcaggggcagggggtgatggaggatggctgagaatatcagtcctttgacatcctttctgccagtgagaaatgggttgagaagagtcgatgctggcagaccagaaccagcagctgctgggtcctgagtatagcagcaggaagtgctgggagagccaaggtttcttctggtgtgccaattccaggcagctgatagcagctgttgagaaatattctgtgaccttgtctggagtcagtgggtaaaagtgctgggaatcaatgaatcctgtcttttgtgagctgggggagagagagtggctactgtgaagtttttgtctacgaaacaaaagatacggcacaaaactataaaacactgacaataatactaagatcatatcccaatgtacaatctacaaagcactcatatgttttagcgtgcttgagccgatcatgttcttgggaggtgggtattattacagccacctcaacagtgaggaaacggcagctcagtgagatgggaagatttgcccagaatcccacaaggggcaagttccgtgaacacaagtgtctaatcctagccttgctccctcagctgtcccttagagactgtgccaggacccaggagtgtgtagatgccaggatgggggttggggacctggacctggtgaccatggccctggctgtatgtgctggcaggaacttgctgctccccgagggggtgccccccgaacgccagtgggcccggttctatgtgaaaatttaccgagcagaggggctgccccgtatgaacacaagcctcatggccaatgtaaagaaggctttcatcggtgaaaacaaggacctcgtggacccctacgtgcaagtcttctttgctggccagaaggtactggggtatgaggtacaggaggctggggctgggtgacaggtatcacaagggcaggctgatgggtgtggggcctggggcagctgggcaggtaagacaaggctggaaatcatgttggccagggacggacttagaggatcctcactgcctcctggagtccttagactgagagctgcgcagggggcatgagagggaggagaggctgggggtgtgggaagagtggagacaagtccacacacaggcacgcacacacacatgcacccactcatacacgcacgcataccaactcacacacgcacgcataccaactcacacatgcagacacgcacccactcacccgtgcacacgtgcacccacgaatacacacacacatgcacccattcacacacgcacacacacccactcacacatgcacacatgcacccactcacacacgcacacacacccattcacacatgcacacatgcacccactcacacacgcacgcatacccactcacacgtgcacacatgcacccacgaatacatacatgcacccactcacacgcacacatgcacccattaacacacgcacacatgcaaccactcacacacgcacacatgcatccactcacgcacacatgcacccactcacgcacacatgcacccactcatacacacacatgcatccactcacacacgcacgcgcacccactcacacatgcacccactcacacacgcacacatgcatccactcacacacgcatgcacacccactcacacatgcacacatgtgcccactcacgcacacatgcgcccactcacacacacacacatgcacccactcacacacacatgccacgccctcacctgtgctcccccttccaccagggcaagacttcagtgcagaagagcagctatgagcccctgtggaatgagcaggtcgtctttacagacctcttccccccactctgcaaacgcatgaaggtgcagatccgagactcggacaaggtcaacgacgtggccatcggcacccacttcattgacctgcgcaagatttctaatgacggagacaaaggtcagcagcgggagacccggtgtgctggggggcagagggagtggcctgaagggaaggaatatgtgagatgccctctcttcacaccaccgtcatcagctctggtcctcagcctcacaggtgcttccagggccttgccagcagcccctgcctcagggggagggtgaggatttgtggctcaggtcggctcagagctggcctgagcccagctgactggatttgtcagctagtagttgtgtgacctgttttcccatttgtaaagtgaaaataataatgattatatgatatgataattatagtatgatatgcacattatagcagtgtatatactgcatttgtatataattacagtgtgtgtgtatatatatatgatacctaatagtagtgcctatctgcagaatcgcagggattgactacctcctaggatccctgccctgtgctgggttccaaggacatagagtgagataagaatctattcctggatcaaagtgctcactgtgtattgaggagatagatgtgctaccaaatggtcaaaacataaggcagaagacacaaaaggccacatgttgtctgatccatgtatgtgaaacatccggcaaatccacagagacagaaagtagattgccggtttccaggtgctaaagggaggggattgggactaactgctaaataggtgcagagtttcttttgagggggtggaactgctctggaagtagatgatggtttatagcacagtgaatatacgaaaaaccactgaaatgtacactttaaaagggtgaattttatgtcatgtgaagtatatctaaatttttaaaatgctataagtgtgttttttaaaaaaaggcagaataaaaaggaaatgaaccaaaaaaactggatcatgagacccctgtcagaggcctgacaaatcttagccataagagaagggacttgtgcctaggaattgggaaggcttcgtgaggaagcagcatttcacaggcagagatggagagggatggccttcagcaaggaggggaggggtctgcactggcagggtcaccgtggtgggacagagctgcaaaaatggcacagggcccaaggtcatgctgcggacttggaaggactggctctgtcctacaagtagactgttgacaattcctgctctaagttccaggaagcagggagctagactttgccttcccactgcttccagctcaggcccccgcagggaagaaatagacccaagagagtgctccaccccagcgcagtgtaagaaggctgccccacacctgaatggcacacatgaagttctcagctcagcacccaggagctggaggccagggacccccaaaagaggcccctcttccccagggaaactggatgtgacgctgccccctcatttttgttcccactgccacaggcttcctgcccacactgggcccagcctgggtgaacatgtacggctccacacgtaactacacgctgctggatgagcatcaggacctgaacgagggcctgggggagggtgtgtccttccgggcccggctcctgctgggcctggctgtggagatcgtagacacctccaaccctgagctcaccagctccacagaggtgcaggtggagcaggccacgcccatctcggaggtgagaccccaggcactgtgctgtcccccagggcctccagctcagcccccttctccctgagtcacctgggtcccaggctttgcctgttgctgccctgtctacctgaggagtcatacctcaggataaggcttctccccaggaagcagaggcccccactcagccccgcaacaggactctgccctcgtccactgcctgcctgtgctctgtctcacaacggccgccaggtctcacgatggtgcctcccctctgcccctcttcccagccacggctgtccctgtggtgtctgcagccagccctgcttccatggatatccaggctggggggccgttggggtgtgggctgcctggccccaaagccgggtgggatgcccccaccatccacccccacggcctgtctgtgagacggaaggaggcctggcccccgacctgccacccttactcaagctcaggaacgctttgaactgcctccccacagagctgtgcaggtaaaatggaagaattctttctctttggagccttcctggaggcctcaatgatcgaccggagaaacggagacaagcccatcacctttgaggtcaccataggtgagtgctgggcccacgggggcttcgggcctaggtgagtgctgggcccacgggggcttcaggcctaggctgcaggtggtaagtgtgaggctctgcacctcagccctgtcctcactcttgtagggaacgttgacccctttcccctgagaggcctcaagcacccacaaaacacctttgtgtgtgcatggggtggaccacgccccataaaggggccaaccctcagctccacctacagggtgaggctgtgtttgggacctggggcagagggcagggagaagcccttcccggggctggagaggagagagtgggaactcaggccacagcctgggccagggctgggcctcgcactcaggcgtcatgaggactccctgactctcagcggagtggggacacgggctaatgctctctggctaatgatgtgtcacgtctgagccccattccctgactctccctctcccctttcccaaacccaaggcagcaccggattggacggtgggaggggcctggtggggaatgcactctaggccttctgggcccattctgctccaggcaactatgggaacgaagttgatggcctgtcccggccccagcggcctcggccccggaaggagccgggggatgaggaagaagtagacctgattcagaacgcaagtgatgacgaggccggtgatgccggggacctggcctcagtctcctccactccaccaatgcggccccaggtcaccgacaggtgggcccagcctcccatcctcctgtggcctggccctcccacctccctgggcccccaagacctcacctcccgcctctgcccaccccaggaactacttccatctgccctacctggagcgaaagccctgcatctacatcaagagctggtggccggaccagcgccgccgcctctacaatgccaacatcatggaccacattgccgacaagctggtcagggccaggccaggggccagcaggggtggggtcctgggggagacggcgctgtcagagggccttccctggaacacacaaagctggtctgcccagggggctgcaggaacggccccagcaggacctctgttcccattctcagccccaggtcccagggcacagacaaggacaggagccacctctagtcactcagcctccagtgaatcctggggcaggagtgttgggttccctgatttttccagaaatcttaaaagcaaggctagggagacaggtgtggtggctcacgcctgtaatcccaacactttgggaggccaaggcaggtggatcacctgaggtcaggagttcgagaccatcctggccaacatagtgaaatgccgtctctactaaaaatgcaaaaattagcggggcttggtggcgggcacctgtaatcccagctattcgggaggctgaagcaggagaatcgcttgaacccgtgaggcggagtttgcagtgagccaagatggcgccactgcactccagcctgggcaaccgagcaaaacttcatctcaaaaaataaaataaaataaaataaaacaaaataaaaaagcaaggctagggaagggaaatggggaaaagggagaagcgagcagtgtctgaagctcaggagctgccccctcctcctctgcccacccctctccccccatgagccatgggcactgactgggcgaggagtgcagctgttggcatgagacctccttctccccagcctggggaagcagggaccagcagataatcccgcccttccctgagctgttgctgttccctgttgaagttccctgaagctcagccagctcatattttataaaaatgaattaaaacctccaaaaaaatcaaggctaatatgaggtctgctcccagccccctgccaatgtcctccttgtcatccctgtcttgtgactataaccacaattaaagcccatagcctttgcagtgtgacctgggtctgcagttatctgcaaggcttccccctaaggagctggggtacaagctgacctgtgtttcctgtgggacctgggtctcacagccctcccagtgctctcagagccagagccactccctcttcccccaggcatctgttcccatcccctgccacaggctccagcattctggagtgacgtcaggatcttggcacatccagtcctagggtttccctctgtctctggccagccctgagccccgtagccgtgagttctgcccaggccctgtgagctcaccagagccacagactcacagcccagaggtggcttcttccttcaggaactgaagaacccccatgaacaccaacatctccaggttctgagaacagaacctgggaaattgatgacttcctcatgatgaccgatactcaggatggccctagcgagagctcccagatcatgaggtccctcactcccctgatcaacagggaggaggcatttggggaggctggggaggcggggctgtggcccagcatcacccacactcctgattcacaggaagaaggcctgaacgacatacaggagatgatcaaaacggagaagtcctaccctgagcgtcgcctgcggggcgtcctggaggagctgagctgtggctgctggtgagaagggaggggcggcaggtggggggaggatgaggcggaactggacaaaggggaccctgccagggctgggcagatgaggaagaatctacagagcccctgctggtcaggctcgctaaaccccggctcgccctacccccagccgcttcctctccctcgctgacaaggaccagggccactcatcccgcaccaggcttgaccgggagcgcctcaagtcctgcatgagggagctggtgaggacgcaactggacggcgggggctggagggagggcctggttgtgagaaggtgtcacaaccccctttgtcatggcccgagctgtcccccagttgctgggttcactgacaccccctccttcgcaggaaaacatggggcagcaggccaggatgctgcgggcccaggtgaagcggcacacggtgcgggacaagctgaggctgtgccagaacttcctgcagaagctgcgcttcctggcggacgaggtgcggcccaaggggtcggggctttgcctcatccagggctggctctctggggcccctcaggatcagggggctcaatcaggaggctagacccccttacccactgcccctggccaccccccaacccccagccccagcacagcattcccgacatcttcatctggatgatgagcaacaacaagcgtgtcgcctatgcccgtgtgccctccaaggacctgctcttctccatcgtggaggaggagactggcaaggactgcgccaaggtcaagacgctcttccttaaggtgctggagggggcaggatggatgggggcctgggtcctttcaggggagcagcagcccccacctggggctggaagcctgagtgacagggtggggccttcaagcagcaggtgctcagagaagagccaagaatgggaaggacgtgggggaaggggtggggaaggaggtgggggaaggggtgggggaaggggtggggaaggaggtgggggaaggggtgggggaaggggtgggggaaggggtggggaaggaggtgggggaaggggtgggggaaggggtggggaaggaggtgggggaaggggtgagggaaggggtgggggaaggggtggggaaggaggtgggggaaggggtggggaaggaggtgggggaaggggtggggaaggaggtgggggaaggggtggggaagggggcatgacggccccctgcccatcctcctgcctccaccggaccccagcccagcgggatggctgtgaaggggcagggcagctctgaccagggcctctgccggcccctgccccttccccacctcttgggccctggcagccgtcaggctcctggtgaccccatgcccacccccagctgccagggaagcggggcttcggctcggcaggctggacagtgcaggccaaggtggagctgtacctgtggctgggcctcagcaaacagcgcaaggagttcctgtgcggcctgccctgtggcttccaggaggtcaaggcagcccagggcctgggcctgcatgccttcccacccgtcagcctggtctacaccagtgagtgaggacccctcactcgaagcctcacctgggagggggccggaggggctgcccatcctggaacctcaggctgcccttccccacagagaagcaggcgttccagctccgagcgcacatgtaccaggcccgcagcctctttgccgccgacagcagcggactctcagacccctttgcccgcgtcttcttcatcaatcagagtcagtgcacagaggtgagggcctgggaggagggagtggctctggctttgagagcaccagaagcctgtgagcctgtggggactggagcctgtggggcctgtgagcctgtggggcctggagccacaggtcagccagtgccccggtttctcaggggaagccctgcagataactgcagcagacgcgggtcacactggaaaggctacgggctttagctgtggttatattcacaagacagggacgacaaggaggacattggcagggggcttgggccaaacctcatattagccttgattttaagatttctggaagaatcaagacacctgtcactcctgcccccaggttccgtggaagctgagtgagtaggggtggcttctgtttgtgcatctgcccccccctctgtcacttgtcccctgtctccccatcccatgctgcaggtgctgaatgagaccctgtgtcccacctgggaccagatgctggtgttcgacaacctggagctctatggtgaagctcatgagctgagggacgatccgcccatcattgtcattgaaatctatgaccaggattccatggtatgggtgggctctggtgccagggaccccagcagcaccacacctggcccttgttccctgcactccacctgcgctgaggctgtgccctcacctccgccacccacctgcagagctccttggccaggtgctggctgggaagctgggagtgggggctgacatctagctcctcctgcctgcttgcggcagcctgaccccttcccaggccagcacatcctcacctcctgtctcctacagactgagccctggaggtgtgccagcaagtcctgctgtcactagcctccccaccccagggctccccgacccctgccctcacctaccacaaccagtaacagccttgccatcctccgtggaggttctggagcagggagtaagggattggggtgacccccgagagttagcgagccaccttctcacataccacctcagctgctgaggtgcccagatagccctggactagaggtaggaggacctcatgtctagtcctgagccgggcatctgccatttactgactgcttggccttgaacaagtctttggtgggccctgagacttggtttcctcatctgtaaaatggggtgatcacacctgtcccttacaacaactcatggcgctgtggtaaggaccaaacgagatcacaggtgtggacagcaagcaccaagaggcttctgggttgtctgttgcgtcagggcaaagctgacttcatgggccggaccttcgccaaacccctggtgaagatggcagacgaggcgtactgcccaccccgcttcccacctcagctcgagtactaccagatctaccgtggcaacgccacagctggagacctgctggcggccttcgagctgctgcaggtgggactgcagggaagaggggctgaggcctggggactggaggctgggagttggggcctagggctgggggctggaccctgaaggctggggcctggggtctggggcctgggggtggggcctgggggctggaggctggggcctggggctgggggctggggctgagggctggggcctggggcctggggggttagggcctgggcgttaggtcctgggggttggggcctggagctggggcctgggggctggggcctaggggcctctctcctacccatcctgaccaaagctgggggcgtggtccttagggggtttccctgtctccccagatcatggcaaacaactcatggggaaagagaccctgtccctgggctccccagtgtgtgacctgtgacccccattccccagattggaccagcagggaaggctgacctgccccccatcaatggcccggtggacgtggaccgaggtcccatcatgcccgtgcccatgggcatccggcccgtgctcagcaagtaccgagtggaggtgcgagggctctgtgtggcccttcccttttggatgaggagtctgaggacccaggaggggaagtggcttgtcatccccctcccaccaccatcaccaggagccagcagcagacccaggctcctgccccagcccagggcctgcccccatctgcaccaagtcgcactcccatgtcccaggaccatgcccagccctcctgtctgcacccctgaccctgcaccccttctccgggcagccccaccctcatccctggagaacgcctgcccctcctctgctctcctggccctgctcccaccctttgaaatctggggtgaactactgcccatcccactgcccggttccctattggatggtccagcacccccatggctggctcccttgactaaggggctctcttctctgcacccaccctccaacctctcccaggtgctgttctggggcctacgggacctaaagcgggtgaacctggcccaggtggaccggccacgggtggacatcgagtgtgcagggaagggggtgcagtcgtccctgatccacaattataagaagaaccccaacttcaacaccctcgtcaagtggtttgaagtggtgagtgcaggccctggcggaggacatcctgtggccagtgtggctccactcagccagccggcttcctctgccccttcttggaggctcaggctcctgtcgccaacaccccaggacctcccagagaacgagctgctgcacccgcccttgaacatccgtgtggtggactgccgggccttcggtcgctacacactggtgggctcccatgccgtcagctccctgcgacgcttcatctaccggcccccagaccgctcggcccccagctggaacaccacgggtatggccacatccaccctgccaccaagcctggctccacgccccccagggaagggctccaggtctccgcccagtccaagccgcgaccagagtttgctctttggggccgagggggtgggcatagaagaaggtcaccctggtggccaaggaaggctgcccaaggtgacgccagctctacagccagagagggcagaactggagacagcctgggggggcctgagggcagaaagccccttgcgctggttgatggagaagacccaggcctccccgccacctccctcccaccggcctccgcagcttccccttatctcgggctctcttcttccctccccatgcccatattttctcccttgactgcctgtccccctctccctcagaaagttccagaatcagctttagttctccgcaccttcctgccccgccaatctcactgttcctcttgctccttcctctgcctgtctgtccatctatccatctgtccagtcaggcttctccggcgctgccgtgtgctgtgcaatgggggctcctcctctcactccacaggggaggttgtggtgactatggagccagaggtacccatcaagaaactggagaccatggtgaagctggacgcggtaaggcgggtggggtcagccccctgctggctgggaacatgcaacttcgtgtgacacatcctgtgaaccagactatctgccccgagagaaaaggacactaagagcctcctttggcatgtgactgtcgggggctgagcttgattgtgtgtccaaacagctccctcctaatactatcctggaatgcacacgcgtgcgtgtggtatgtaaatgtgcatgtgtgtgcgcatgtgtgtggtgtgcatatgtgcatgtgtgtgtgcatgcatgtgatgtatgtgcatttgtgcgtgcatgcgtatgtgtggtgtgcatatgtgcatcgtgcatgtatgcatgtggtgtatgtgcatgtgtgtgtgcatgtatgtggggtatgtgcatatgcacgtgcgtgcgtgtggtgtgcacatgtgcatgcatgtgtggtgtatgttcatatgcacgtgcatgcatgcatgtggtatgagcatgtgcatgtatgtgtgcatgcgtatggtgtgcatatgtgcatgtggtgtgtgcatatgtgtgtgcatgtggtgtgtaaatgcatatgtgcatgtgtgcagtgtgcatgcatgcgggtggtaggtaaatgtgcatgagtgtggtatatatgcatatatgtgtgcatgtgcgcttgtgtgcatatgtgcatgtgtgcatgtggtatgtaaatgtgcatgtgtgcatgtgtgcatgtggtgtatgtgcatatatgtgtgcatgcatgcttgcggtgtgcgtatgtgcacatgcgtgcatacatgtgggtgtgtgcatgtgcactggcatgtggtatgtgtgtatgagagacagagtgagccatcacagtttattataatcacctgctataatttttactccaacaaatgacaccataggtaatgattccttatgagatcatcagtgtcctttccaaagagtccctggttttccatcccagccattcacaaatgacacttccctggcctgggtcagaggaggatttccaggtggaagctccttattcctcctggctttgggcctaggactgttcatctgccagagagagaactgccatctgggggttgggtgtggaagtggcgtacaagctgtagaccctacagggaagggcagaacgtgggccagcctggaacacagcccactgttcctttggccacccaaagaaacatcctcactcagaccctttgcagactcaccagtcagagtgctcttattaatgcaaagttggccttgcgggcacaggggctgccagcacacagtaatttccatctcggctcctccacacaccctgtgctaggccactgcctgccactccaggccccagtggctgattctgcccctgtctccttggttcctctgcagacttctgaagctgttgtcaaggtggatgtggtgagtgtgggggccatgcaggggctctggggtgagagggtcctttattggcaatgatgtcaggccaaagggtccagcatcagggacagagccagccccagcccccgcatgcttgggccagcacacctcccctaagatgcagtggaaaagagctgggtgagtgcaggactcggtgccagtcctgcttgggcgagtggatcgcactggcaggtcacaacactctgtggcctgtggcaccttctccataaaataaggccctgccccttggacatgggtggccccacagagcctcatggagcccaaggcttcctgctgacagatggcggaatgggtggaggctctcgggattgtccaggcaggaggagtccatgtaggactctggacctggccaacctgcaggctgaggaggagaaggagaagaagaagaagaagaagggcactgcggaggagccagaggaggaggagccagacgagagcatgctggactggtggtccaagtactttgcctccattgacaccatgaaggaggtgagacctcgggtagggtgaggggaggtgaccccctccacactcagaccctcctgtccagcttctttcccacggcccccaagagctggatcccaactccattcatgtgagtttgggatggttttgtctcacatccttgaaatcctagctcagaactcaccttccaagatgatggtcccatctaccttccctgcttggttttcttttgtcctcattgactcattccacaaatgcctcttgggtatatgcgatgagccaggctccatactaggtgctatgggagccaaaagatgccacacctgccctgatgggcctccggtttactgggcaaaatggacatgtaaacagagacttagagaggactatgtgataacaaaggcaaatcatggcttgggggaatcagggaaggcgtctcagaggaggtgacctttgtggaaaaggagaaacatgttctcagaggccataagggaacaactgcttatcagtagtccttacgactcttcttcataatgttttattttacacatcttggtcatcggcacgtgaatgattcttcccctattacacatatgtgggttccatctgtttggccagattgcaagttccagaaagcgcatttctctgctttcttgtttgtgtcctctccacgctgcctacctagctcagggtgctctgactggccacctgaccaggagggacacatgcctgcagttgtgtttcctcagtggggccagagctgatccagccacatcctctcccaggccctttctgtgacccaagctaggtgtgatatttattagagcacacattaagctgctgtagcaagttagagtgaagtgaacaagacagcagtttatttctcacataacatctcagagagtgggggttaggctggtatggtggctcagtggtgtcaaggactaagatcctgacctcttgtttgtcacatctgtaaggttggaggtgactcaacatcatgttctaattcaagtgcacaggaagggttaaagaggagatgaggcatatgcttttctttttcagggcccaatccagaagctgcacatatgacttccactcacattgatcagaatctagtcccttagctacacttatctgcaaaggaggctgggaaatgtaatctttcacaaggtggctgtgtgctcagcaaaacttgtaaaaataggagaacagatcattgaggacaactggtagtctcgtctcccaccatcaagttggccaggctggagctgcaagaggctgcctgttgtcgtctctactcctgcaattttcacagactgccaccaggtggcggtggcgacttagttgaaacctggtttctagtttctagtaagatttattctcgtttccagtaagatggggtgtgctgagtgaaagaaaatatagtacattttcttactgttatacttttgtacattaaaacaatttattaatatcactaaaagcaacattaaaatgcactgtacttttttaagtagaaaatgtaaatatttattgcaaggtgttatttcttttttttttaaattatactttaagttctagggtacatgtgcacaatgtgcaggtttgttacatatgtatgcatgtgccatgttggtgtgctacacccattaactcgtcatttacagtgggtattgctcctaatgctatccctcccctctcccccagcaccaccacaggccccggtgtgtgatgttcccctccctgtgtccaagtgttctcattgttcagttccctcccatgagtgagaacatgcagtgtttggttttctgtccttgtgacagtttcttcagaatgatggtttctggcttcatccatgtccctgcaaaggacatgaactcatccttttttatggctgcatagtattccatggtgtatatgtgccacagatgcataaacccctaagtaccactagtcacactgtacacattataaactttttttaacccacttaagcagagcacatggtggacttgaaatgcagtagggaagattttctacttctagtgcattaagactggtctgggcccacaatttggggtcaacagactcctccccaggaaacccaccttctgtccttttcatctcatcttttggcagcaacttcgacaacaagagccctctggaattgacttggaggagaaggaggaagtggacaataccgagggtgagccctggaacctggaactctgcctcctcctccccgcccctgggtggtcagctctcctgcccacctcatcacctgcttctcttttccctcctgccagccctcccagccttagtagccagggaagcagcatcagtaatccatgggcagtactgggcaggctaaggcccttgtccagggaggcttttactctgaccagttcagcacccacagtgatgggcagacatttagagccacagaacatcagagctagaagggacctcagagctcattccatccagcattttccagactcttttccatgaagaaaattgatggatgttctagaaggaacaaattagttttggtcaaattagtttaggaaaagctgattgaaacagcttgttttggtgcaggacttttcataccctttactgtgcaaatgttattatacatctctaaaaggaagacacagtataaaatatttccccagcttattggatcacagtaccctttcttctaaagcatgccagcagcatctgcaccaggtgctccactgaatgaggtttgggaaatgctaatacagagtgttattattatggacaagaagagggaagctagtgaggaaagtgagtgggcaaggaactgcgcagcaacaggcctccacccccaaacccatgctccttcctgcccctctcttccaaagggcatgaagacagtcttcagacaccttcccgggcataaacccactggggcccccagcacctccatgaggcgggcatgctagggagtattatctgcatttgacagcacatggacatccgagagttaagttagtaaagcaaattagcgacagagctgggtctcgaatccaggccttcctgctctgctcatttctgctccacctccttttctgcttctggccaggcctgaaggggtcaatgaagggcaaggagaaggcaagggctgccaaagaggagaagaagaagaaaactcagagctctggctctggccaggggtccgaggcccccgagaagaagaaacccaagattgatgagcttaaggtgagagcctaggagcagacccttctagggtgtgtgggggcgggaagaggggggcgcagtgatcctgcaggtggggcaggacaaaagccagagaccaggcagccgccccctaacagcctggtctgtctcaggtataccccaaagagctggagtccgagtttgataactttgaggactggctgcacactttcaacttgcttcggggcaagaccggggatgatgaggatggctccaccgaggaggagcgcattgtgggacgcttcaaggtcaggccaggagcacgggcccagcctgagcacccgccagcccttgccccccccacaggttcccccactcacctcccaccactgccccggccactgcctccagaagccctggactctcccatgactcagcagttaaagggtgaaggccctgccacatcagggtccagccctcctggtgctgttagctattttgaatgccacccttgccaggcaaacctacaccctgacccacatttgtcttgcccagggctccctctgcgtgtacaaagtgccactcccagaggacgtgtcccgggaagccggctacgactccacctacggcatgttccagggcatcccgagcaatgaccccatcaatgtgctggtccgagtctatgtggtccgggtgagactcccgtcgctttccctccttgcaagtctcctcatcctcccatctgggagagagcaaagaagctgcatactggccaggtgcaatggtttacgcctgtaatcccagcactttgggaggccaaggcaggaggatcacctgaggtcaggagttcgagaccagcctggccaacatggttaaaccccgtctctactaaaaatacaaaaattagccaggcacagtgccacgcacctgtaatcccagctactgaggaggctgaggcaggaaaatcgcttgaacctgggaggtggagcttgcagtgagctgagatcacgtcattgcactccagcctgggagacagagcgagactctgtctcaaaggaaaaaaaaaagaagaagaagctgcatactgacagccccagactgggaggcaccagggagatcatttggtctagtctttatcttttctagaggaagaagtcaacgcccagagaggggtagccacttgcctagggtcacacagcaagcctcctgaggggtccagtgctcctgcccctgcccttcactgtcataggaccctcaggcagcctggcaggggcactgaagatgagcagggcatgggagcctgctcaggcagcccttctccccattccaggccacggacctgcaccctgctgacatcaacggcaaagctgacccctacatcgccatccggctaggcaagactgacatccgcgacaaggagaactacatctccaagcagctcaaccctgtctttgggaagtaaggcttcttggtgccctcccctgccacacccctacttctccaacccagaacacctcccaccctagccaatccttaagcccttctcctaactccaccccaccaggtcctttgacatcgaggcctccttccccatggaatccatgctgacggtggctgtgtatgactgggacctggtgggcactgatgacctcattggggaaaccaagatcgacctggagaaccgcttctacagcaagcaccgcgccacctgcggcatcgcccagacctactccacgtatgtggggcatggggcagagggcgggggcagtgtgcctgctttgcctccactctaaaatgagattcagatcctggtgatttgagaggttagacattgtggtttctgtcccaggccaggcctctgcccctacagtccctgggcacagtcttcaggggacaggactgcagatcccaaaacaaggagagggacagtggattccaggacagaggaggcaggacgaggagagacaagtgggctagggaaggtgggggctagcaagaggaggacagaaagagtcccctggggatctgggccagctctgccacttataggctgtgtgaccctggccaagtcccttcacctctctggttttcagtttcctcatgggagtctctgaggttccagaggagtgggcacagtgaggggatgcagtggggctaggctggggacactgatatgtggtccaaggcccagggcaggaaggttcagcctccagcagccctagtgtctcaggtgagcctggggcccagggcaggaggaatcaggctcacttgctgatgagggcaacagccaactttagagaactggccacgaccagctgtcatccaggatggcttagtcccacccagcccctccaagcctgtgtgtcccctcccacagacatggctacaatatctggcgggaccccatgaagcccagccagatcctgacccgcctctgcaaagacggcaaagtggacggcccccactttgggccccctgggagagtgaaggtggccaaccgcgtcttcactgggccctctgagattgaggacgagaacggtaatggggcactggatgcagccgcctgccccctctccagggggtttcagaggccaggaggggcccacacttccctggggaacctcacagcctagcctggggtgtcctcagcctaaacctggtcttagtgaccctctgctcatcaccccagagccccgttcctgtctgcccagcctctgtgcttccacccctcctacagggcagccccacctgctttctctctgtccaaatcccagtgaggtagagaggctatctgcatcccattctgcagataaacaaaccaagatcctacttctagtgactcgcccaaggtcatgtggctctttagaggcagagcgagggcatcggcccaggtccatctggctctaatccttaaactctccttacttctctgtccatgaggcacttcccagagaagcagagaattgggaggtgtctgtgctggtatctgatcactttcaggtgctgggacaggaagtggattctcccctccctgacccttctctcagcccagcagggctctccagtcaacttccccaagcagaggaccaagggcacagacctctcttggccctgtggggcagctgagaccctgggcaagccacttctccttctgtgcctcagtttccccaacagtgaaaaggaggtggggtagacaggtgatggcatagaggcttctttgtgctcctaagtccctagtcccagcaaaggtcttctggttctgctgagccatgtgtgcagctgagccgccggcacccacaggtcagaggaagcccacagacgagcatgtggcgctgttggccctgaggcactgggaggacatcccccgcgcaggctgccgcctggtgccagagcatgtggagacgaggccgctgctcaaccccgacaagccgggcatcgagcaggtgacacttgcatggccaagactggggttcttgggtattggggaccagggatccccaacctgagtcagtaaaggtagaagccaggcctcacgctgtccgctgcattccagaaagcctggcaggcaccttcccaccaaggcccctcagggtaacttgaatggcaagggtctttgctttgagtgagaattacatcagctcaggcagagacctgggttgtctccctcagaagctgtgattggctattggtgacatcataggaattcctggcatccaaagatggaaactgatgaactgggtccttgacagaacaaaggttaggagggagaggagagctgatcttcctgggcagagggagaaggccctgggagatctgccacaaccctcttcctcagggccgcctggagctgtgggtggacatgttccccatggacatgccagcccctgggacgcctctggacatctcacctcggaagcccaagaagtgagcggcctggggcccagcgctactcccttccggcccaccccacccacttcccaccacggcccaacccttcctgcggggggctcaggtccagatggccttggccagttggcatccctggggcctgggtgtggccactgggccttataggggagaaactgaccaaccaatcgatagagtttagggcctgccctggagagtccccacgtgctaaggcaggacaacgccttccaccctgcatcagtgagcgagacaagccccacacagcacactccggtgcattgtatctacacggtctacgcgcccatacacatgcatctcatgcacacacacacacacagcatagcactcccacggacacccacacacatgcccacactgacgcactccttcacaacacacagaacccctgggagccggccctgcgtcatcctcacatccaggctagtgtgatgttccgccaagttttctttggagtgcctgccagtgatgaatccaggagtgagtgcctggaagaggcaggaggtggtagagtgaaaagaacccgggtttcccatccataaagcggcaggttcaagtccagctgtcagacagtgactggattcagggccagcttcagggatggaggaagccacacagggtcccactcttgtttccatgctcctatgttgccatcttgaaattctttatgacaagtgaccctgcatttccatttggcgctggccccagcaaatcatgcagcaaattctgccaggaatgtcctggaaacctgaggccatgagtcagctgttccagggcctgtcattagggggcacccaactcactgggccactctgggctcgcagccctgtctgcaatcccaggagagccatgctcagatcaatttttagtgaatgactcagcctcactcttaatgattgaaatgaactacatcattcataattacaattaaaccttgaggggaaaatcctctttggggacagggacatacagcttccatgggcttccattgctggctactgggcttaaatgcagacttctcttggaactagcatctgagacagagggtggcttcctcccctcaccccacccccaccgcccacagccatgtgcctggtgggccttctcactcatgcctctgctcccccaaccccaaaccactcctccagccccagcctggcccaggccctgtgctgaccccaagaccccagggcttctctccgcctgccccatcccagccctggcaccctggcataacccccacctggggctgctaaccagccttctctccctgggcccaggtacgagctgcgggtcatcatctggaacacagatgaggtggtcttggaggacgacgacttcttcacaggggagaagtccagtgacatcttcgtgagggggtgggtgagcagtccctgcatgggagggactgagctgggtggggcttgcttcccggggggcaggagaggaggcagagggaaggtggctgtgggtgggagaggccccaccagcctggctgcgggtctggagatgtggcgcccacaggtggctgaagggccagcaggaggacaagcaggacacagacgtccactaccactccctcactggcgagggcaacttcaactggcgctacctgttccccttcgactacctggcggcggaggagaagatcgtcatctccaagaaggagtccatgttctcctgggacgagaccgagtacaagatccccgcgcggctcaccctgcagatctgggatgcggaccacttctccgctgacgacttcctgggtgcagagcagggcagggatgggggttcaggatccagaactgagaagaggcaggggccgggttggcggggacagggagagccctgccttggggggacaaggggtcattgcttccagtccatcagagccaggggtgtccgacggggttccgcccccaaggacccacctaaccgtccctaggcagatgttctcagtgtcataaccaggctgacaacaagctttggacacaccaaggagggggcagtcagtgatgatgggggaggggagaggctccctaagggagtcgggaaacctccctgggcctcaggttgcttctctgtaaagcagggattctccctaaaactctaatctgcatctgcaaaagcttgtgggattagcaggactttgacagaatggatgcatggcagggagtggcaggggagaccccaggagagaccctctggggtgaaagaaggacctgagtaaagcatgggggctggggctgcctagcaagcccacgaggatgcctgcattgaggccagttgctgggagtgaggcaggaggatgagatgtgggctcagggaggtctgcactcagcaaacaaggggccgaggagcccagacccccacccccaccccgccccaccccagccctgttcactctgagctgacactgaggttgccacaggggccatcgagctggacctgaaccggttcccgcggggcgcaaagacagccaagcagtgcaccatggagatggccaccggggaggtggacgtgcccctcgtgtccatcttcaagcaaaagcgcgtcaaaggctggtggcccctcctggcccgcaatgagaacgatgagtttgagctcacggtgcgcaccccttcctgctcgggcagtaggcagggctgggactggctggggtgccaagggcccagcacgcagcctggacgctgggacctgtctgtcctctgcagggcaaggtggaggctgagctgcatttactgacagcagaggaggcagagaagaacccagtgggcctggcccgcaatgaacctgaccccctagagaaacccaagtgagtgccctgccggcccagcccctccccactctggctcttggaggcgctggaacaggaaggagacgatccccagacaccccatctcttcctgggccacagcctcattacaggggagcctcctccctgccctctgccaaccctgaatcccacaacgtccctttgaaccagaggatgggctaggaatactggagagcaggaccttccctgggaaaggccccatctagcggagagaaactatgctcttcccttcctagcttttgcagaagagccagctccagtggtggcctctggggccatggccagccttgatggccagaggggtgcctagaactgcacacacagcccaggacagcttccctcttggtcttggcccctcgccacacccaatcccttctcctccctgtccctcctctgcgctctctacccttcatactccagccggcccgacacgagcttcatctggttcctgaaccctctcaagtcggctcgctacttcttgtggcacacgtatcgctggctgctcctcaaactgttgctgctcctgctgctgctcctcctcctcgccctgttcctctactctgtgcctggctacctggtcaagaaaatcctcggggcctgagcccagtggcctcctgggtctgatatttcttacttcttcctctggaccaagggctaggcaggcgcgtgcacacacacacatatacacgcacacatccacaaacacaaatatgcatacatgtgcacacaaacacacacaagcatgtatgcacacatgtgccacgcacaagtgcatacacatgcactcaagcacacacaggcacacacttaagcccacacaaacatgcacagcaactttcaagctttcatgacagaatagactctcagaactagaaatgactattttacacttttccacattaagccaaagaggtgaagtagcttgctcaaggttacccagcaaattagggtagagccgggactcaagccaaggtttccaaatttccaatcctgtgttctttgcacaccacctctgctcccagccatgtttctcccagactgtaacccaattttttttttttttttttttttttggagacagagtctcgctctgtcgcccaggctagagtgcagtggcacaatcttggctcactgccagctccgcctcccgggttcacgccattctcctgcctcagcctcctgagtagctgggactacaggcacccgccaccacgcctggataattttttgtatttttagtagagacggggtttcactgtgttagccaggatggtctcgatctcctgacctcgtgatccgcccatctcggcctcccaaagtgctgggattacaggcgtgagccaccgcgcccagccgactctaacccaatttcattggcagaaagaagctgagctatggacagggaaaagggaagggtgtggccagggttagccaacaggtctggaaatggctctcacccgtgtgtgacctcccagtccagggctgttgttttctgcccttcaggataataattccattcaactcaaacatttcatagccaccatggcctgaacacccaactgcaggtgctcagagctccccaggcactggctcactgtgccattgcgccaaacccaggaggtaggtactgcttgtaaccccattttatacatgaagaaaccgaggttgatagaggtgcctcacttgcctgtgaaaaccattcaaaaccaggtgccctgcacccaagccccggctctgtgtccccaccaatactgagctcagctctggggctgcacgccatgtcctctgggaggcagtagtttgaaaatgcatatgcagtactttcacttgtatcttgacattttacaaaacctattgtttttataacacaaacgacagatagtgaggctggccaggtgcttctcggctgggaggctctacagaaggtggagtgggtcttcatcctgagagtgggcaggtcggtgagggcagcttgcaccccacaggggctgctcagaccctcagcagggcccggtgggaacagccatttatgtccatcagaaaggaagaggttgtgaagcaccagtcttaccaaggacgtggggcagcacatagaacgagctaaccgcaggagcttcctaacgatgagaactgcctgcagggccaaggctgccccatgctgcaagtagctcccatctaggccttaggaggagattcgggccccaaaggtgctgcagggaggatagagttttgtaagcagcaagtcgggtacttagaaatgggtttaaaccctggctccagcattcactgcttttggggctggggccatggcagggcttttgggggtccagaaggacagaggatggggtgcactgggaggcagctcctgcccactggctgaccggctcctctcttccacttcccagccggcccgacacggccttcgtctggttcctcaaccctctcaagtccatcaagtacctcatctgcacccggtacaagtggctcatcatcaagatcgtgctggcgctgttggggctgctcatgttggggctcttcctctacagcctccctggctacatggtcaaaaagctccttggggcatgaaggccgccagctcccgccagccgctccccagccctgccgcatttcctttcagtggcttggactctttcccatctcccctggggagcctgaggagcccagcgtccactcttcatgccttgggccgagcctgcctcctgcttgcgggggccgcctgtcctcactgccccaggctgcggcttgcccagtcccgcccctctgacccctgcctgtgggctggggagccttggatggggtggggacctggaatgggtctctcttgccccacctggctgaggcgccacccttcttcaggcccaggctccagaggaagactcctgaaaccctccccaggtcttccaagtacaggattgaagctttagtgaaattaaccaaggaccatgggtcagtgcccagggctttaaaaagaatgaacgagcaaaaggtatccccgccgtgacccctgcagatagcaccggtctttgatccgcagcaggggccagaccctgcccacaagtcccagcgcggctgcttctgccactgctgggctccacttggctcctctcacttcccagggggtcgcctgtcctgcctgtgggtttccatggcttcccagagctccctctgccccagccagcgcctccaggcccagctgaggagctgtgagaagcagcagaggggactccccatcccgggcacaccctgtcctcccacccctgcccccttgcccttccagccctttcagctgcagctgggagctggcccgtcaagtgctgcccctgcctgtgtctgggtttctgttggctgtttttcttttcttgagtggtgatttttctctaaataaaagaagtcaagcactgagctgacaggtctgcactggtcaagctgagaggagcagccgcaggtgcggggcagaggcagcagttctctaggctggcagattcagtaccagcagggctcccatggcctttccccttcaagtggcctctggtggcccagggttcaaggcaggcctcaggcacagggctgcccacccaggctgcccacaggaggagtcttacaccatagcccaaagggcacaccagcctgggcccaggggcccccaaagcaccgaaagaatccttcaggtctggggccagtctgaaggcttaaggccccacaagggcccaaaagctctagcctccacccacagaaaccagttcccctgaaagcaagaaaggagccccacgctactggcctcggcctctgactcacaccactatctgagcctggggcaaagtcccctcatgacacagaggtaggggcaagggcctggtcttgctagacctgacctctttaaagagattcagccacaactttaaaaggctttaatcataatgcaggacacaggtaactcctctggctccttatttcgacaggctataaagacagccctggaaaatccagagagcaggcccaggtgcggcccagtgggtgatatgagctggctccggcacagacaccagcatcaggccagccctaacacatcagcctttggcggtccagctcattttgtgggtacccgcaacacctgagtgggaggaacttgcagttcagagttgatctggaaaagaaagggtgaaagtcgttacatttttcccagggccctccttctttgccacccttgcgagccacgctggctctcccatgggcctccaaagccctgcacgcatctcctctccaaagctgagagatgctgaacacccacagactgcctccctgcaggagacacgcctgagccttcttgctcagcttctgctccagctgtgacctctggtagcgttcttcatctcccgcccgtccattctctgcagtcttcccctctcctctctccacgcacccatgccatccccaatctagcctgccccacctcttcctcccccagcctcttgtatacagtagcatctgtggaagcgggaaccataccgtccagaatgtctgggtcctgtcacaggccaagggtcattatgaggccaaggttcactacaacatcccactttcagctgtggcctgggacctgggactgtgctggggccacgcagcccctgtggctggacttggagctggcctcagtcacctcacacgtgtgcaactaacagctgcgtcacgaccttcctggcctacagccccagctgcaggtgcccacacccgcagagcaggaaatgtcagcaatggactttttccttcctcctcttgccaggccatggggaagttgtccacaactattgcagggttgggcacagatgggggccagggaatatctgccccagcagagcctccttccccatgcgaggatgaccctccagtcatatcccaggcagggaaccggggctggtgggtggaaagagcccaggctctggacgagttgcaaactctgcaagttgtgattgtcctttgtgtgaaatgaggagcattgtttccgccctgtccacctcacacagcgggtgtgaggatggaagaagagagcacagctggaggctctgtagctggggagctgctcctggctgtggcactgcttcacacagagcagtcccagctggccactggcaccagaaaccacagtatcaaagagacactgtcacacctgagctgtcctggaggagacttcaggcaagatctactcctttggccagtagttgtctcaaggtgccactcttgattttttacatcatatcacaaagctcccttgcctctgacggggaggggactcctcgttccctaatcccagctccagtgcccctgccccacccgtgtctcccgctgcccctccttggaaggccccgccgcccaccttggagttcagatactgctgcagtagcgcc

SEQ ID NO: 20 - protein, 110 aa, Homo sapiens
MKTDSSFIMDSDPRRCMRHHYVDSISHPLYKCSSKMVLLARCEGHCSQASRSEPLVSFSTVLKQPFRSSCHCCRPQTSKLKALRLRCSGGMRLTATYRYILSCHCEECNS

SEQ ID NO: 21 - DNA, 330 bp, Homo sapiens
atgaaaacggacagctcattcataatggactcggaccctcgacgctgcatgaggcaccactatgtggattctatcagtcacccattgtacaagtgtagctcaaagatggtgctcctggccaggtgcgaggggcactgcagccaggcgtcacgctccgagcctttggtgtcgttcagcactgtcctcaagcaacccttccgttcctcctgtcactgctgccggccccagacttccaagctgaaggcactgcggctgcgatgctcagggggcatgcgactcactgccacctaccggtacatcctctcctgtcactgcgaggaatgcaattcc

SEQ ID NO: 22 - DNA, 24900 bp, Homo sapiens
aagatgctccgtggaagggagccgagcggtgggcagaggctgagtccccgataacgagcgcctcacatttccgtggcattcccatttgctagtgcgctgctgcggccgcacgcctgattgatatatgactgcaatggcacttttccatttgacattctctctctctctctccctctctctctctccctctctctctccctctctctctctccctgtgtcgcttaaacaacagtcctaacttttgtgtgttgcaaatataaaaggcaagccatgtgacagagggacagaagaacaaaagcatttggaagtaacaggacctctttctagctctcagaaaagtctgagaagaaaggagccctgcgttcccctaaggtaagcaggaaaacaagcgctgccggcttgcctaggaaatcgcttctttccaaaccgagcatttcatcctcctctcagacaaagagacaacctttaaataccacttaaatttgcattactttaatttgcattaatctgtagcatgctagcattgtgtttcttaaatgaacgggtctttgaagtctgtgacagagcagggagcctcctagaaaagcttgaaaatatcttttggtttgacttaaagagatttttcttttcaaactctctgcgtagttagatgtaactttgtgatggttcttatagttgaccccgtgaaagggggctgcgaagcagcaacttgccaacatggattcatggagcccagtatcttccccagcaccctcatcccacttacaatgggggcactattaacgcaggcaagactgcgagtttaaaagcgcactgtttacttttattactacttatgtatgctgctgatctcctgccagggctctgccggagtgctcagaatgacttcaaacaataggcaacatttatttctagctttctgtgtcacgctttgcaggaatcctgctcccttgcactcttctttcagcgtgcaggtcttcgcttccatagatgcattggggagcaccgggaggagatgaggatggatttactgtatgattttgattgggcaaaaagtccgaggaaatgcatgctgtttgccttggacttattgcagggggttatttttagtcatcagctcgtccctgcagcatgatgttcaaggagtgaccgggaaaggatgctcccaccagcacagagaccaggacctgtaggaatgactcctacctgcgggatattccgaggtttctttcaaactttggaatacaagttctctctttaaatgaacaattgagctgtaggaggcctgggcataactctttcttgggggacgggaagtttgattgtgtacagaatgttaatgactcagaacgcccagtaactgaggctcattgtaatagacaaacccagataagcctccatgagaggcagactcccatctttactgagattcaggtgcgggaaaggaagctatttggcaagatgggagtcccttgtacagttctttgtaactcattaataacagatatggctgctgtgaaacatgtctcttttcatttctaatattagtgtattttaattacaaggagctggcattggcaaattaccccaacacataagattaaataccaggtgcatttgaaaacagagagatgactgaaatggggagttgctgtgggtgtcaaccaaatacagcggggacggcacaatgcttctcaactgagcgtttaaaccagatgcaaatatctgctcattttcttctcatcagtcttactaattcaaggaaactttatggtcctgtttgccagttttcattgcaaattggtacacagtttatgcaaaacttttctgattttctctgataaccagcccaataagcatcgctgaatgaaaatctgatatttgaataggttaatttacaactttggggtattcattagtcaagaaagccataaaagacactatggattccattgctgtaaaattttattgtaatttttttttaaaaaaactgcggttagcaaagcatttagctgaatcaaaacaattttcttagactattattcagatcattacatgagagtatttgaacacaaaatgcaatgttttgcatcatttattttaaaatacatttggttcaggtaacgggagaactggctgaggccttcttacgactgtgtaccaagcagctgacacccacagatggaaatgtgcctgtggagttttcaatcttaattcgagttccaatgacactgtcaagggaaaaataaatcatttttcaatacatttaacaatttccaactcatttattttcctgggcccttgaaaaatgtggtgagtttcttggaattatagccaccaatggtggccagcaatctttattttaagaactcacaattcaagtactattattctctggttaattatttatttcatcaatttttaaataaatatttattaagcattttctagatgcccagtgctatgctagtcccgatggatgcaaaggtgaatgagacattgtcccatactctaattctcagtccatatgccatctctagttagattttggaactgaaatgggcattgccaatgggtaaagtgggcaataactttcctgttataaagaattatttaaaacagctactggtttctagatttacttgaaatgattctcactcatcagtgggttttctttccatttatgattaagggattcccctttggcctttttcaccagatcctgggtacacgtcatttgcacagctaacacggctagatctttccagcctgggtagaagaatcccggaaaaagacagtagtttatcctttctctgctctcctgagcaccctgtggaaaggaccatatgctgtctctattggggatgggtgtgagtcgcctactcagtagctaacatcagggccacttgatgaatcatcgaattagaaacatgcatatggaggaagatgcagtcactatccctcaccacttacttgtcccacccccagtatcaaaacaaatgacctctgggcctggcctaaattcaagaggcccctgggaagaagctgttggaaactcttccccaaacccaggtctccatcatagccacacagtgttgctttcaaataacccagtatggtgttttatcacgtgtttaggttactgggggaaaaaaaaaaccctgaaaacagcatcaccagggtccttgacttggtccttatcagcagataatcccccgtggttggattaaaatgcctctgactccctggggtgcctgactcaccctagccagccctcagcttcttggccagcggccttcgagcccatcctcacctcttcccatgacggccagtgactgcttctttgcccaggccctctgcactaggccagcagccagtgggagcagaggggatgggaaggcaggtggacagactgtgaagtgctaaggcagagcggggaagcagggctgtgagacagggtgggtgagctccagggcctgggttgctgtggcctgccctggctgtgatcagctgtcatttcctctttgtgtatgacactgtggaacatattaaaatttctctgggatggtatgtttggaattcctctgatgccccacctcaccaacttacccggacaataaaagcaaggttgtaagcctttgaacagctggctggctatatatttcccttctttctttcgcataatctaattcagaaaagaatccagctagactggcagtgccatgtctgggtacttgtttcctgcaagtccttcctcctccacctcctcccgccagtcctggaatcttcctgggtggcatgtggcttttcttttcttttgctcaccactgctcccagcccgcccccttttcccttcgcctgagctccttcctttgtcagctggctctttgctctgcctgttttccagacagcttgggtcctgttccatccggggagaacagcccatgggatctccccatctccatagtattcccaggatgtcattcttggcaccagctctgccgggctgataggactggggggctttttgtagtcccgagcctgaatccactcacagagaggagcagccacatggcttagctgccctttgggctgccgagagcggggctggagtgaccgggttggcaggaacgagcataccatcacagtgacccgaacatctccggcaaaggccttggggtgggagcgctatgggaatgcctggatgcacttcggcctacattaagagaaatgtggttattctctgtttcgggggagagacaagcggcttgaaacaaagccctctggatccttggccccttccctgccccctttcccggtctgtccttcccacatccctccctccccaaacagaaagaaagagagacaggacttctaatttggccagcacagacccgaatgtctttatgaaacccatttagtgaaagaaagaggggagaaatatattctgggttgatccgaactaaaaaatgcatggggctttggagatggggcgggattttttctttctttctttctgtctcttaagagcagaacaacagtttcgttgatgagttgcaaatggaaggaagtggacctctcaattagagattcccatttaagagcctcaatgtaaacctccctgtgacatccttaaaagatgctgctaatgtccctgggaccaaaaggtattaaacagcaagccaccaggcggcttcctattccttttctttttctgggggctttggtcgtctttttcaaattagctaaaattcattaaaggacccaaaaggaaaaatttaaagcagctgaattaaaatgagtctttccctgttagcctgacaagaagaaaaaaagaaaggaagaaagggaaagaaagagaagaaagaaccaattcccctccactaccacttcttgggttttaatatgaattattccatacaagtccctaggctagaggatctatttaaagacgcctggcagcatgaagggagagggtaaaaatacaaccactcttttgtccatcaaaggttttctttgggaggacattaagagcattcctgttttcttgtctgcccctgccagtggcaatgttccagctggtagtatccactcctcgcccatcaggtcagcaatcatgaacttctgtgtttaatttcaggagaaaacaaagggtgggaaatccttccgaaacccctatgtgtgtgcagcagggcaggggaggctggaactggaatcagtactctcttggctgtgcaggttgcatgctgcaaattcacacacccacacagttgagttgttgaggaagattgtgccgatggcattatttctgatgccagcttcccttgcatctgcaaagcttttttcttgtgtctctggcagtcatttgcttgtcaccattcatgtgcactgtccccttcatcagaggttctcagagcctgatggtcaaggatatgtcactagagtcttacccccagacccattttcaacagtaagaacgtgaaaccctggatggggtttgcaatctgaagcaactactttcttgttaggaagagtgctgactcagaaaattcaaagaatgggtaacttccgttggcgacatatccccagtgctcataatcaggaattcatccagttggggtccatttcaccctcatggcaaaatctggacataaacattgactagtagctttaaactgggtataagatttgcaacagataacatttttgtcttttcttttttcttttttttttccacaaaagctaagaatttttcagacaatttgctctcttccaaggcctggatcaatcccaactttttcttttaagccatgatccaaccaattgcagtatcctttaaaaatgaaagggcaacaggctaagacattcaagaaagttgataagctgtcagaaaatgctcaagggtggcctttctacagtgccacaaaccaacaacagccctaaacgtggagtcctcttccatcctttcatcagtagggaataaaaatagggagagagcaggtcaggggagaagtaacaaaagagaagtaagaaggattatttttgatgttcaaaatctgctgctgccctttcaatattttcaaatatcacaatttcagaaagggaaggatccctttatttcacccactctccctcccaggaaggtgtttgaagttgctgtctttacctgaaaaggaggtcaactcctcaagtgaaaaaacatcccctatcttcaactcgaagtaaaatggaggtacacacatttgtacctaattatgtgggtacaaatataatttgtatccacaaactataaaggatgtaaagaatcaaagaaatccaatccttaatcaaagtccaatttttctttaaaacttgagaggatattttagggctcattgcattgctgtgatttcactgccccccaccaaattatgaaaaattactccttttcagaatttaaatttttcttttgagatgtggaatccaaaggcagcagaatagtattgttacagggaagctggcagtcaaaagacatagacatagctgcagcatgcatggtttaagcaaatcaagacaagcagaaaaccaccaccccaacaagttcagggttatcagcaatatagggacacgtatttttatgtgatttttatgagaaccttgcccctttgacatatgtctgagtctaggagcattccggattgcaacgggattgaattcagtattcaaatcccaccattgggcagaaaaggcaaattgaatggggaatggaaagactgagttgctcctattgtttatgccccattcctaactaagggctctacagctgttaggtgagatcactacccaccattccaaagtgttgttgcgggtgaggaggttcaaacgcagctttggaaacactttgctgcactctttgaagaaaggccaacatgctcatttggctctagggtaaaagagagcctgtaccctgagctaacattggtcacctctcctcctgaggccataccacagccagcagtacagcagcagaacaagtgtttagttgtttcagcacaggtatccccagaacacctggcaccttttcttttccacagggagaatgtacattcatgcattttggcaagactgagtcctctgagttgggtgtctcggaactctcctattttccttctaaagggtcttatgtaaggtgagcagtagagtgtgtctcattcctcataaaaaatccccttcctgggagggagtgggtgaaatgaagggatccttccctgactgaaattgtgctatttgaaaaaattgaaagggcagtggcagattttgaacttcaaaatgaatccttcctcctcctcctcctcttttgttacttctcccatgacctgctctctccctactttaattccccattgaagaaaggatagaagaggactctgtgtttagggctactgttgatttgtggcactatagaaaggccacccctaagcattttctgacagctcatccccatctcagtcacagcttttatttgggtagctggatttacagaaataatcaaatccctagaggaaaagacttcaacagaaaagtacctcctgacacttgggtaacctgacttggtcatttccaatttatgcaagatttgtattctaaaagtcaattagttatgtcaactgttaaaaactcagaatgagtctttccattcttcagaatgactcttttctgattatctgtgggccatagaagcccacagatactcagcacaggatccaagtgccataccaagtggtcaactcttttagacgtaagtctcagcccagggcttctggaatgtacctcccctagcagagaagctctgtagtagatactttaccaagcacagggcctcgctcttgaccccaagactactgattctacttgcagagaagacaacttttctaatcaatctttctcttctatcctgaaccagagtatcagagattgtcccattagggcacgaggatctgtggctcaagctcagttaagaaataagcgtctttcaaaagaaaggtgcaagagggtggaactcagcctatattgtcattatcaaatgcaagaagtctaatcctagcatgatttattaatattagcctttcttctctccccgtttatgctttggtgggtactggacagaaaccccacaaattttaagacagttttaagagaaatagtaactggttaaatatcctcactacttcaaattattattattattattgatattactgttaacttttgtttttttgagacagggtctcactctgatgcccaggctggagtgcagtgatgcgatcacagcccactgtaggctcaaccacccatgctcaggtgatcctcccacctcaacctcccaagtagctgggatgacaagcgtgtaccaccatgcctggctagtatttttttattatttttgtagagatgaagtctccctgtgttacccaggatgatcttgaactcctgggcttaagtgatcctcccaacactgccttctaaagtgctgggtttacaggcatgagccgctgcacttggcccacttcctatgattaacaggatattattaatttagaaactatttagtacatggcaagcactcagtcaaatggttattaacggctgtttttatttcaggccaccaatatagcttcatcaaggggcaaatacttatagcttgggcttcagtgttggatcagacaccaccttagaagttttttgcaatcattaactccttaagtaagaagggaactctttttgtaggattgctttggggaatatgtagccccaaggcaggggctgtactctgagaagcttgggtagagttggagactgttagaaatggatagacacataaaagcatttagaccaatctgttcattttgcagatgaggaaattgagtcctagaaaaggcaagtgacttgttcaagatcacacagccaatgatgggagggtaggactcagggcttgaggatcagtttcagaatgcagtgaaattgttatcccatatttctttcaaatcagtatagggacacggaacactaacaacataggcgaccaatgggtctagggaggaaaagatgaaagctgtaggtaagtgggagtttggataacaatgagatgtttttctggagttcctgacaatgcctgaaaaaaaaagtcaggattttaagcttcagtcaggctcaaggtcgagtcctcccactccagtccctcctcagacagtaaaacttttcaagccaaggacatacatataggtgggggcatttgacagttggctcatctccccaccctccaaattatttatatttctagtccttcagtttagcactcctatttaccccaggattgtaattcattgcctctttccctggccatattcctccatcctttttgtttctcccatctcttttcttcctccatcacccccactgctgagcttggctacacttggctagtagtgcaggttgggagaacacagagtcctatcacagactggaggactattatttaatcacaagaatgttgtcttttttctcctaaggtagcactctggggacggtcattgctgtctttattccctcacccccccaccacccctgcactggattagacacatgaaatgtgcctatctctgagatgaaaggagcaagaactgcttcctccccactgaccttttgcctgcccatccttggagatacctggagttggcaggctggaggcctagcagcatttgcagtcagtgccgctgcctctgggtcagcccaggcttggctccttggctgctactgatgtgctgccagctaggaatattaaaaaccattcattgaacgcacaggatgctttataaaatccaacatgctgtttacagtttataaattaactgccttgggaagaggcatttgacttattctccaaggcatctagttgactagatccaattggaatcctttgagttcctgggaaggggctacttaacacttcacactttctaaattagacctagagtttcttgcttttctgatcctagtactgtatgaagttttatctagggttatctagcaagctttcttccacttataaatctttgatgtttttgcaatttctttgatagaggctttatgttctactatcttcactttatttatgcttcataccataattttttaaaaaattacaataaatatcaagtaattctggctgatatactgactccattccaaggtcattatattttatttgcttaacttggtcttcttagaaatgatgcaatgaatactggatacaaattagatgttcagagagtttatcaatgtgtctaaaaaccatccaggaaaacaacaggccaagactctgcctgcagagtcagtgagctagaagagggatcgaggataggaactatatttttcccctgaccctatctcttatctgctagagcaaaaggagacacacagtaggtgctcaataaatacatgttaaaaaatatttgttgaaagaagccacagaagggaatatcagtatacattagtattgaaaacagcctagggggaaatatggatactgaagcaccaccctcctgtgcctggcaagcaaggcaagaataaggccattcttggcacataccacttagcctgttgctgagataacttgcgtgaaaccagcactttaccctctgccagccagaaggtcagcccaagagtgagctgatctgtgggcacaacaccatctctcacccaggaggctgggcccgctgtaagctctgctatattatttccctgaggatgacaggtggggaaatctgggcaccagttgttcttttccactggtatcatttggaaggtagctccaaagtcgggcacgccagcctacgtgcctctcctgccggcagaggctccacattggagctattagaatgtgggctctgtacgtcggccaagtccatgtctcagagactgtatccagagcatagcgtggccacagggctactgagttcagcaagagagtcattctcttgttcaatccattattgcctgggccaaggttctaagtcttcgtaggcagcatttgattttatgacacgtcttaaaaaattaaggcaaactggaattaatttagttttgagaaaacaacagaagctgctacaaggcagagataattctaggctgccagaaagtggtgatctcagtggtgtacattttcttaattcctgattttcctctttgtgaggtcttcctcccactcccatactttgcacattctcacctatgcacaccctgagcaacacaatgttgacaacttgacttagcattgctcttttcttaagctttgttttcatttcttcttcaatacaacagtgttggttcattcaatttgaacactcaaggcaaaaaaaaaaaaaaaaatcccaggttatgttttcagaatcttacctttttgtttttgttttgagggttctgtgagttttgtggcatatttacattgttgcttacattcttatttcagaatttaagataaaaactgggcaacaactctcacgttttctgagtgtgttgaaatgaaaaatctgtttcttagaattaatggtaaagcaacatttcctgtcaatctttcattctttaatattacttctgggttcagctcaccatctctaaagagaaagccagatgatcaagttacattgtatgtgacattaactatctctttatctgtgtaaatgtcataatatctgcttgcaaagtgttttattcatttttaggaaaaaattttaaactgtgcttgcaattcaggatggtgctactaggtggcagtaatgtacaagaactatgtggtcgccctggaagagtatttgactaagagactagcatgccttcccgtaattataagaaataaaaatataatatttttaaaatactcaaactggcacaaacagtaaacatccattaacttagttaccatatttaagctgagcttttaaaagagaaagccttattttttaatgaaattttaaataaagtatacattcacaagctcaaaaatctaaaaatacgaaaagatatatagtgaaaagtctttctctcatgcctgtccctcaactaccacaggtaactaattttgttagtttcttgggtatcctttcagagctttgctatacaaatatgtgtttttatctctctccattttaactcaaatcaatacatagagtttctgcatccttccatatatagttggttagtatattgttgtgtgaacattttagaatataattaaccagtcccctattaatggatatttcatgctgtttccaattttatgctatttcagccatgtgctcatgtgatttcacatgtaggataattcacagaagtggaattgctgggtctaaattatatacatttgcatttttaaaaggtattgccagattggcctctacagagtttggaccaatttatactgaactttctccaaaatggacttgttttcccacagccttgccaatagggtgcatgatcagacttcggaatctttgtaaatctgattggttgaacaatgtatttcaaagtactttaattttcattctcttaaatgagacttttattctcttaaattctcttctatctttaagggccctttatatttcctttttctgtggagaaagtggaaatgccaataaatacaacgatgcatacacatgtatagggttttgttattgatgtagcttgtttttgccatcatgctgtacatgatgttctttaatttgctttgctcatttaaccatacctcctggccatggctctgaagagaagttgctggcagtgcagaagaagggccaggactggaatgtctgcttctctcttcatccttttgccattgactcctgggggaaatatctgtagaccgaagcagtgaaatctaatcaattctctttctgacactaattaaggcttcaaagagacagataaccacttgggataatttagtcacagtgaaacttgggaaatggtcagtaatatttcatcctctgaaagtggaccccaagaaagttctggctctttgagttgttgtcttggtaattttcagggtaacgtgtataggaaaacccagattatgcagatgaaaagaaaacaaacatgctcttctgcatcctttgcagatttgaaactttgggcacaggtttgatttatttcaatgagatgttgctattagcatgaacataaagtggtgcaaagttgtgctggaatatggtctcgtcaactttgggctcactgtctgcatatggagatgatagtaactgaatccatagttatcaagtggtggcattttagaacacaaagggacagcagatgccatctctgtcaactccttccctctacagatgaggaaacttgggctagaggaggttgaatgacttgtgtaaggcttccccagctaattaatggcagtgccaggactcaagtccaggtgggttccctcattactggtccttgcccttcctgcaatttataggacttccctgaggcacatgtgctgaggctttgctattgccagggattctgtgctctgaaacagccctatctcacacacccctttccacttaggatcccctacctcacacttccaagacagctaattgaggctaaatgggtctgatgccattctattagtgcaaaataaattggcttatgccaacttgaactcctaatcttgattttatcaacactttgccctgtttattcagactgttcatgagtaggaagttaaggaaaatgttgcctatgaacaaaatgatcaaacttttatctgaaatacctttgaaagttttcccgaagctttaattatcatgttccttttgttttggatgtaatagcaggccctcccaattttcctaaatgtttgaaaatatttttgatactttctgtcttctgttgtggttaaaaaaaagaaggcaccagtgttggctatgcctggggagttagtgaggtaatctggagagatctctggaccccagtcctttgtccaagaggtatggtcaaaagaacaaagcaaatttcagaaaaaccggtataatatgatcctattttaatggtaagtctgttccaacaactgctttctttttcgaattacaccatgtgcccaggctacaaaggctctgcagaaatgtgactctgttggcaaatacgcgtgtgataccttaaccatgctggaggccagttagcataatgtgtatttcagatgcagtttgtcatcagtgctgggtgctatggggcttaaaacaaaaacaggatgagcctagagcacagaagtggaaaattaggtgggtgggtgagtatggacttggaaatggaaaatgtgcttccctgtgggacatggcttgtgttcattagtgctgacctgcctcctctctagccctgtaagctgacgctgacaccaaagcttgctgagaaactgaatagaccctcccgccccgaccaaccaaggacaaagatgagaccacccaattcggttacgttgttgccagaacaacatgtttaatctttaacatgggttcaaactattcttggccctaggaacatggacttcagcaattaaagtcaacatgtgcttccattaaaccattgtgtccacctccaaatggttataaatatgtagcataagctatgggagttggggtggaatggatgacagcctttgctaatgacgctctagaaaccaatattctcctctcaaaataacatggaaaaattctacttaatacctcctgggttccattagtggttctgggtaaataattctggggaaagtaatttctgttttcattccagctgtgcagcagatactgtgatgatggattgcaagtgcaaagagtaagacaaaactccagcacataaaggacaatgacaaccagaaagcttcagcccgatcctgccctttccttgaacgggactggatcctaggaggtgaagccatttccaattttttgtcctctgcctccctctgctgttcttctagagaagtttttccttacaacaatgagaaaacatgtactagctgcatccttttctatgctctccctgctggtgataatgggagatacagacagtaaaacggacagctcattcataatggactcggaccctcgacgctgcatgaggcaccactatgtggattctatcagtcacccattgtacaagtgtagctcaaaggtaagaccaaggtctctgtgaggagagcatttccctcagaaacaggcaagaagccatatttctttgtcaggggatggagaactaagatcatagcccaaacttaagtgatgtggctggcccacagggcttgtgggagaatgaggcttttagaatttccccccgtgctttgcactgttatcagtaaaagtgcctaatcaatcatgtgcacacccatccagtgggacaggtgtcctttgtccctggctgtgatgtttatgagtggtagtgtgcttttccaaaaaagaaaaatggagtttacaagtcatcataactctctagctccatcatcaataaagaggaagagaatgcaaagaatgcgattgagcagtggaacatacttcttggagggctctttaaagagattcttggtgaaataactggctttgtggtctgagcctttcttcaggtgctacatttctgttcaaatgatttcaaaagataagatggcaatatgatcatttatcatttttacattgcttatccaaatcgttctcatttggaaaaggatgcatgtttcttgcagaggcagtccgtgcctcagtggtgtgcaagggaatatcatgcttaaaaggccaccaagagtggccagctacatggaccacccagaagggaggcacattgtagggtggaacatacgagatctcacgactgtcactgcccctaaacaggcacaatgaatgaaatttgtccacacttggtaaataataatttgtttagcccaacctcagagatttttacatttagttttgagatgaaaatcacttaaacattctcgtatggcaagtaatttttgaaattaccagtataattaagaattttttatagtatcaatcaccagaattaagaccatataagccaatccctccactctccattcaaaaacattatgacttttgtatgccttgaaaatttccattaatttctctgattatagctcagtgatgatgattcattttagtttaggaggatcagaattcgagttaaatcattttaaccattatattaataagatctatgactgtgggaaaaaatagagattttccacttaataaaaactttctggctcttatttgtgcttgtagaaccaaaaaaaaatggagtaaatagatgaacataaatttttgcagggccacaattccttcttaggaaagggaaactaaaacaaattgagaaaaaacatgagaagtgcttttacaagtgtgattgctcagaaattgtgggcccatgtaaggttgactgcagcaattattagtttctccttccctcccccttcagaaacagacagcatgaatatttagtgattttattccatggataatttctttccgtattgagttgtcctccataatcgtgattcttttttaaaaaaaggaattaaaattatttcaaagaaagtgtcactatgatgatagaaaggaacaaagaaataggagcatctataaaaactagaaaacaatctggaaagactggacaaaatgatggaggagtactttggcaacaatcacattaatctagcgaaggtcaaagaagagacatcatgaactcaaaccgaagaaattcacatgtgaattctgagcatgagtcttagaaacagactttagtgtactgttattcacctttgtttcttccagaaagccatggcaaataacagcgcaaaattgtgatagcaggagaaatgtttgtaatttcatgggaacaatctgttttcaaacatcccaaactatcccaaatatagcaatagttttatgtaaatggtgcttgcaattataaacctttcttccctggccataaaatatgcctggcaaaatctcaactacccagaccttttctaggttagatttttctctatgtatccaggagcaaaactgttttcatttggaaatgttctataattcttaactcttacattctcgggctgatcttttctctaatgggtctcacttaatgaaattgtttgcctttagagacttggataaaacatttagcctatgtctagaaaagaggcaacaacaatctaccctagcttctttttacaaagaaaagactgggatagatttttttgtctctataaaaattatcccttgacatcatgttcaagggtcattatttattaaacatgtgcctactgtttgcctgccaattgttaatgctttctgactcacatttatccattatctggccttgtaaaggcaagaaagggagaatgtgacccaggctcagggaagggagtgtacctgcttgaacacctaatatatgtgtcaggcacctcatattgtatattataatcattgccaagaaacctgtgatggcaggcattattattcccattatcctggtaaggaaaactgaagcccaaaataattagattgcttgatatcatatagccagggagtggcaatgtctgccttacagcattcatcttcccactacttggatcttcatattggaggaacacaagtagaatgtaggagccatcacatagaagttcaggctctgcttctgatctgctggcagtaataatttatactcagcaatgtttctagaaaaaataaataatagtgaaagcctttctgggagctttcaatgagactgttcatcccagccctgaacttgcagctggccagtcctaggtccctgctgcccatctcctagcaattccggaaaggactgagagggagtcaggcagaaaagactggccacagtggcccaccaaagaggacagtgtggccacagattaggatgtgcctgatagttttaagtggtggcacctcctgggtttgggtacaaaagatcctgggagtagcaggttcatttataatcttcatggaagactaagtttctctaaaatttggagtaaaggctgtagagcaaacaggcaaaagaccagttgatagtggaaacagactgcctggtggaatctctatgagaactgaggcatgccaggctttgaagtgagagagacctggtttccaattccagctccatggcttgccgaatgagtgactttgaggaagttcagtaacttccttctttgtgcctcagtttcttcccatgcaaaatagagctgtctacctgagggtatgggtatgggtgttggtgatttgtaaagcatccagcggtgtccagcacataatagccatttaatagaagatattatgatcttgatgataaagttataaactaagcaggtgtttagactcaattttctatttcagtcacaactgagatctcaataactgctgggatctcctatagccttaaaagattaggaaaatgaaccttattgtagttcttgttaagcacagggtggggcagaagagcaaagtaaatgtaagccactgtgctgggtgctaacagggaggataaaagtaaaagagaaacagccccgatatctgtctaaccttccttcccagatgagtggaggaaggaggggctggagggggatgagttttggacttgggccagggaggggatttcaggaatggagggtgggaaagcaaactggcagggaagacctggaaagtctcagttgggtgaggagtgggggatgctggccccaggccagggcatggaaccagggcatgactatctgaaccggtaagggccacaggagcaggtggggaactggaagagcaacaacaaaggataaggaggaagaggtttgggagacaaaacctaggaaaagaggacctggtatgctaagggctgagtcctaacagcttcctaacaggacccccaagccatcttctactgctacccaccaagctcatggtgtgataggagaaatggagggagtcaggaaaattgtgtttataatacaatagacttcttgagagatataatttgatttttttaaaaggaacaaatttatactgagtgcctaccatgtccaggtgctgtggaaggtgctggagactctaaagtggaaagaaagaaaaaagagacaatttttttgccttcatgatgcttacaagaaaatggggagagagggaggaggggtgttctgtgcacaaagatcagtttgtatctgtttgattcatgaccggagtgaagggaccagtttctagttggagtgagctgagttcccatccaccctttcaaagcccccaccatctctctgctgctttgttccctggttgcaattttcttggtgccctcagcctagcacagatcttttggaggttgacctgggtccctgaagatgagcggagttatgaggctgcccgtggggaaagaatgggagaagaagcatgggtgaatcttgttcctgaggttatagagggtgtttcaagaggtgccatggaaataagggtgcatagtgttcactgctgcgaaaaaggcaaaatacttttccactctgtcggagtaaaatcgcaaaaatgctcttctagggtgggacaggtgggtctttattctgatgctaatggtgacatctggtcagtcaaggctcttggaagattcagctctgcataagcttggggatggtgaagctaatgtcccaagaagcccacaagaaaaagttagacttgtatgtctatggatatggtcaggggtttctgaggcaaatcaatgtagataaggaagtctgtgagttggcatatgcttgaggaaaacatggtatcaggaggcaggtattatactggtttaggtcagggctttggtttcagatagaccttggtttgattccagctctgcattttaccacctatgtgagtttgggcaagttactggaactctctaaagcttgagtttccttatctgtcctaatagtgtagatcataacagtactttcttgtagggttgttgtaaggatgaaataactcacattgcaagtgctcaataaatgttcttattagcgaaatgatggttatctagtgattcatctagagcacagccctcaaacttgaatgggtccagagacctgctactcaaagtgtgggcaccagcccagtaggactgacatcaactggaatctgatgggaaatgcagaatctcaggctctaggccagaactactcaatcagaacttgccttttaacaagatcctagatgattcacacgcacattccagtctgagaagctctgatccggaagagatcaggagatgttcaagtgctgaaacacaagtaaggcatggcagaagctaaaatgtgaagtattgagagtaaaccaggagagcagatggttattccttccatcccttaaggatcttatctttcaaacttctgctttaccacttcaacacacaaaacagagatagatttccttctaggagtgtgtgtgtgtgtgtgtgtgtgtgtgtgtgttgagaacatcaatggttcaataattgcttcatagtcttttcttccaggaaagagcatttgaatttggctacagagaatagataggtgggattttattaggcagagcaaggtggaaaggacatatttgggagacagaagacataagcaaaggcaagaggcaggagaattcagggcactttcttggactcctaagtagttaagtttgactggagtagggagtgggtagtagagtgatgagaatagttgtaagtaagactggaaatacatgtgaaacctgggtcatgaagggccttgactcctcttcaagattttggattttattctgaactactgaaggcatttattgtacatgtctgtgcattcttcttgcacaaacagtccagctcccaaggaagaggggcccagcccattggaggtggccccacgtccttcagtgcctggagttcttgtccttcagagtgggctgggggtggagctggacatcctgaaaacttttagtgagattgcaatcagatgagctcatttacaaatggccctacgctgttgacttggtcattttatggacagtgctaatggcccagtcagttaggcctacgtttggttcacctgtgtatacatcacttggatattatgtcccatatcattgttggcccttctgagttaagttcgttggcacagatttactttgtccacccagactgaaactgcacctctgaagactccatcacggaaggtgactctgtgaataactgcttagtcaacctaatagatgatctagatgagagattagcaaatttaacactactccaaggtgaggtatcaagcagctcttcccacatacagggagatggggggagaacagactaaggaagatcttggactctctctctcattagagaaatgggggtgggaattagggactagcctgtgtactactgacctatggcatagtctctcaaaacccatttcagagccaggcacagtggtacatgcctgtagtcctggctacacaggaggctgaggcaggaggatcccttgagctcaggagtttaaggctgtagtgtgctatgatcatgcctgtgaataaccactgcactgcagcctggacaacatagcaagactctgtctctaaaaacaaaacaaaacaaacaaacaatcatttctgatagtttactttgcctgtcaaaatgaagagcaggtaggatagaatcaaaagctttaaaaaaatcaaaacagcttacagctgctattttctctctgcctctgcgatcattcagagaaaataaattcactggtctagtccaacttattcttccctaagccctgctgttttttttttctagtatttcatattgccttggtggttgctaagtgattgttggatttagccccagtatattctcagataactatgccaataatctataattaccagaattcatcttttctcccttttggaaagatggactggctatttttttcttgtaaaccttgggtgtttaattctgccctacaggatgatgtcagagataatagctggtgagtctttaataataactgcgaattcctacaatattgtaaggtaaacgtcaaaaggtttcatgcatatatatgtatcttttaatctttcatttgaacagtttcactttttatgatcttgctgttggttctggaattataggacaaatttttcttttcttttcttttctttttgagacagggccttgctctgtcactcatgctggagtacagtggcttgatcatagcttcctgcagcctctaattcctgggttcaagtgatcctcctgcctcagctgccaaagtagctgggactacaggtgcacatcaccacgcctggttaactttttatttttttttttagagacacggtcatgctatgttgcccaggctggtctcaaactcctggggtcaagtgatcctcctgcctcagactccaaagtgttgggattataggcatgagacaatacacctggcccaggggatttttttctccatcacttaacatgaaattcaccaagcaaaacctcttacataaccatgggaccaataatctcagattctccattcccctccccaccttgatattaggattatgcagcttaatgagtcaagctgtcccaccctacccacctattactcccactcccaggataccaggagttttgtatgggatacataaatgatccttttttccattccgttaagctgtatgcaaattgtgtgtgtgcttatgtacatttttctggggataactttggtagttttcatcagattcttaaaggtgtctgtttgctaaagccagattaagagctactataaagaacacatagcctccgttattccagcccaatctttggaaatagagattatcagaatgggtacatcctaatatttgccgcaaatgactctgaagatgcggatgcaattacataaatcccaggctccttcaacatataaacccagaagtgtgatttcagggccccagacatgccctgtctctacttcattctcttgtcccaaattgcagcacccagaatatttcttcctaagcattactcaggctatcctattttcttattcagaaactatattcctgttctttagctatttcctgcacaaatcaatttcttttttttttttttttttttggtagtcattttaatttacttcttggtttcaatttggattgactttctgcattttgctactggtagaattgcaatgcattgggccagtggtagaccactacctgtcaggagaaatttcttttgttctttggtttttactcgcacatcacagtgatgggcgtcattcagtggttctaaaccctcagtacacttagaaatcacctaagaagctttgaaaaccatgaaagcctggtccctatctccaaggattttaattcaatcgatctgaatgaggcctgggtgttgacttaaaaaaaatgcaacatgcattgagccactggtctaatctagcaggaattggcaacgagtgtgagggtctttcaaaagatgctgttttacctggctaaggttgtggcatgcccacagagtaaccacctccttttctttccccagatggtgctcctggccaggtgcgaggggcactgcagccaggcgtcacgctccgagcctttggtgtcgttcagcactgtcctcaagcaacccttccgttcctcctgtcactgctgccggccccagacttccaagctgaaggcactgcggctgcgatgctcagggggcatgcgactcactgccacctaccggtacatcctctcctgtcactgcgaggaatgcaattcctgaggcccgctgctgtgtgtggcttctggatgggacaactgtagaggcagttcgaccagccagggaaagactggcaagaaaagagttaaggcaaaaaaggatgcaacaattctcccgggactctgcatattctagtaataaagactctacatgcttgttgacagagagagatactctgggaacttctttgcagttcccatctcctttctctggtacaatttcttttggttcattttcagattcaggcattttcccccttggctctcaatgctgtttgggtttccaacaattcagcattagtgggaaaaagtgggccctcatacacaagcgtgtcaggctgtcagtgtttggtgcacgctggggaagaatttactttggaaagtagaaaagcccagcttttcctgggacatcttctgttattgttgatgtttttttttaccttgtcattttggtctaaggttgccattgctgctaaaggttaccgatttcaaagtccagataccaagcatgtggatatgtttagctacgtttactcacagccagcgaactgacattaaaataactaacaaacagattcttttatgtgatgctggaactcttgacagctataattattattcagaaatgactttttgaaagtaaaagcagcataaagaatttgtcacaggaaggctgtctcagataaattatggtaaaattttgtaagggagcagacttttaaagacttgcacaaatacggatcctgcactgactctggaaaaggcatatatgtactagtggcatggagaatgcaccatactcatgcatgcaaattagacaaccaagtatgaatctatttgtgggtgtgctatagctttagccgtgtcacgggcatcattctctaatatccacttgtccatgtgaaacatgttgccaaaatggtggcctggcttgtcttctgaacgtttggttcaaatgtgttttggtcctggaggctcaaattttgagttattcccacgttttgaaataaaaagagtatattcaaaa

SEQ ID NO: 23 - protein, 107 aa, Mus musculus
KTDSSFLMDSQRCMRHHYVDSISHPLYKCSSKMVLLARCEGHCSQASRSEPLVSFSTVLKQPFRSSCHCCRPQTSKLKALRLRCSGGMRLTATYRYILSCHCEECSS

SEQ ID NO: 24 - DNA, 321 bp, Mus Musculus
aaaacagacagttcatttctgatggactctcaacgctgcatgagacaccattatgtcgattctatcagtcacccactgtacaaatgtagctcaaagatggtgctcctggccagatgtgaggggcactgcagccaggcatcacgctctgagcccttggtgtccttcagcactgtcctcaagcaacctttccgttcctcctgtcactgctgccgaccccagacttccaagctgaaggctctgcgtctgcgctgctcagggggcatgcgacttactgccacttaccggtacatcctctcctgtcactgtgaggaatgcagctcc

SEQ ID NO: 25 - protein, 133 aa, Macaca mulatta
MRKHVLAASFSMLSLLVIMGDTDSKTDSSFIMDSDPRRCMRHHYVDSISHPLYKCSSKMVLLARCEGHCSQASRSEPLVSFSTVLKQPFRSSCHCCRPQTSKLKALRLRCSGGMRLTATYRYILSCHCEECNS

SEQ ID NO: 26 - protein, 107 aa, Rattus rattus; identical to SEQ ID NO: 23

SEQ ID NO: 27 - protein, 109 aa, Pan troglodytes
KTDSSFVMDSDPRRCMRHHYVDSISHPLYKCSSKMVLLARCEGHCSQASRSEPLVSFSTVLKQPFRSSCHCCRPQTSKLKALRLRCSGGMRLTATYRYILSCHCEECNS

SEQ ID NO: 28 - protein, 2365 aa, Homo sapiens
MEEVPGDALCEHFEANILTQNRCQNCFHPEEAHGARYQELRSPSGAEVPYCDLPRCPPAPEDPLSASTSGCQSVVDPGLRPGPKRGPSPSAGLPEEGPTAAPRSRSRELEAVPYLEGLTTSLCGSCNEDPGSDPTSSPDSATPDDTSNSSSVDWDTVERQEEEAPSWDELAVMIPRRPREGPRADSSQRAPSLLTRSPVGGDAAGQKKEDTGGGGRSAGQHWARLRGESGLSLERHRSTLTQASSMTPHSGPRSTTSQASPAQRDTAQAASTREIPRASSPHRITQRDTSRASSTQQEISRASSTQQETSRASSTQEDTPRASSTQEDTPRASSTQWNTPRASSPSRSTQLDNPRTSSTQQDNPQTSFPTCTPQRENPRTPCVQQDDPRASSPNRTTQRENSRTSCAQRDNPKASRTSSPNRATRDNPRTSCAQRDNPRASSPSRATRDNPTTSCAQRDNPRASRTSSPNRATRDNPRTSCAQRDNPRASSPSRATRDNPTTSCAQRDNPRASRTSSPNRATRDNPRTSCAQRDNPRASSPNRAARDNPTTSCAQRDNPRASRTSSPNRATRDNPRTSCAQRDNPRASSPNRATRDNPTTSCAQRDNPRASRTSSPNRATRDNPRTSCAQRDNPRASSPNRTTQQDSPRTSCARRDDPRASSPNRTIQQENPRTSCALRDNPRASSPSRTIQQENPRTSCAQRDDPRASSPNRTTQQENPRTSCARRDNPRASSRNRTIQRDNPRTSCAQRDNPRASSPNRTIQQENLRTSCTRQDNPRTSSPNRATRDNPRTSCAQRDNLRASSPIRATQQDNPRTCIQQNIPRSSSTQQDNPKTSCTKRDNLRPTCTQRDRTQSFSFQRDNPGTSSSQCCTQKENLRPSSPHRSTQWNNPRNSSPHRTNKDIPWASFPLRPTQSDGPRTSSPSRSKQSEVPWASIALRPTQGDRPQTSSPSRPAQHDPPQSSFGPTQYNLPSRATSSSHNPGHQSTSRTSSPVYPAAYGAPLTSPEPSQPPCAVCIGHRDAPRASSPPRYLQHDPFPFFPEPRAPESEPPHHEPPYIPPAVCIGHRDAPRASSPPRHTQFDPFPFLPDTSDAEHQCQSPQHEPLQLPAPVCIGYRDAPRASSPPRQAPEPSLLFQDLPRASTESLVPSMDSLHECPHIPTPVCIGHRDAPSFSSPPRQAPEPSLFFQDPPGTSMESLAPSTDSLHGSPVLIPQVCIGHRDAPRASSPPRHPPSDLAFLAPSPSPGSSGGSRGSAPPGETRHNLEREEYTVLADLPPPRRLAQRQPGPQAQCSSGGRTHSPGRAEVERLFGQERRKSEAAGAFQAQDEGRSQQPSQGQSQLLRRQSSPAPSRQVTMLPAKQAELTRRSQAEPPHPWSPEKRPEGDRQLQGSPLPPRTSARTPERELRTQRPLESGQAGPRQPLGVWQSQEEPPGSQGPHRHLERSWSSQEGGLGPGGWWGCGEPSLGAAKAPEGAWGGTSREYKESWGQPEAWEEKPTHELPRELGKRSPLTSPPENWGGPAESSQSWHSGTPTAVGWGAEGACPYPRGSERRPELDWRDLLGLLRAPGEGVWARVPSLDWEGLLELLQARLPRKDPAGHRDDLARALGPELGPPGTNDVPEQESHSQPEGWAEATPVNGHSPALQSQSPVQLPSPACTSTQWPKIKVTRGPATATLAGLEQTGPLGSRSTAKGPSLPELQFQPEEPEESEPSRGQDPLTDQKQADSADKRPAEGKAGSPLKGRLVTSWRMPGDRPTLFNPFLLSLGVLRWRRPDLLNFKKGWMSILDEPGEPPSPSLTTTSTSQWKKHWFVLTDSSLKYYRDSTAEEADELDGEIDLRSCTDVTEYAVQRNYGFQIHTKDAVYTLSAMTSGIRRNWIEALRKTVRPTSAPDVTKLSDSNKENALHSYSTQKGPLKAGEQRAGSEVISRGGPRKADGQRQALDYVELSPLTQASPQRARTPARTPDRLAKQEELERDLAQRSEERRKWFEATDSRTPEVPAGEGPRRGLGAPLTEDQQNRLSEEIEKKWQELEKLPLRENKRVPLTALLNQSRGERRGPPSDGHEALEKEVQALRAQLEAWRLQGEAPQSALRSQEDGHIPPGYISQEACERSLAEMESSHQQVMEELQRHHERELQRLQQEKEWLLAEETAATASAIEAMKKAYQEELSRELSKTRSLQQGPDGLRKQHQSDVEALKRELQVLSEQYSQKCLEIGALMRQAEEREHTLRRCQQEGQELLRHNQELHGRLSEEIDQLRGFIASQGMGNGCGRSNERSSCELEVLLRVKENELQYLKKEVQCLRDELQMMQKDKRFTSGKYQDVYVELSHIKTRSEREIEQLKEHLRLAMAALQEKESMRNSLAE

SEQ ID NO: 29 - DNA, 7098 bp, Homo sapiens
atggaggaggtgcctggggatgccctgtgtgaacactttgaggccaacatacttacccagaaccgctgtcaaaactgcttccaccctgaggaggcccatggagcaagataccaggagctcaggagcccttcaggtgctgaggtgccctactgcgacctgcctcgatgtccacctgcccctgaggacccactcagcgcctcaacctccggctgccagtctgtggtggacccaggcctcaggccagggcccaagaggggcccatccccctcagcagggctcccagaagagggtcccacagctgcccccaggagcaggagccgggagcttgaggcagtaccctatctggagggcctgaccacttccttgtgtggcagctgcaacgaggaccccggctctgaccccacctccagccctgactccgccacccctgatgataccagcaactcgtcctctgtggactgggacactgttgagaggcaggaggaggaggcccccagctgggacgagctcgcagtgatgatcccgaggaggcctcgggaggggccgagagctgacagctcccaaagggctccgtctctcctcaccaggtcccctgtgggaggagatgctgcaggccagaaaaaggaggacaccggcggtgggggccggagcgcaggacagcactgggcaaggctccggggagaaagcgggttgtccctggagcggcaccggtcaacactgacccaggcttcctccatgacaccacacagtggacctcgaagcaccacgtctcaggcttctcctgcccaaagggacactgctcaggctgcctctacacgtgaaatccccagagcctcctctccccatcgaatcacccaaagggacacctccagggcctcatccacccaacaggaaatctccagggcctcatccacccaacaggaaacctccagggcctcatccacccaagaggacacccctagggcctcatccacccaagaggacacccccagggcctcatctacacagtggaacacccccagagcttcctctccctcacgaagcacccaactggataaccccagaacctcttctacccagcaggacaacccccaaacttcttttcctacttgtactccccagcgggaaaaccccaggacaccctgtgtccagcaggacgatcccagagcctcctctcccaacagaaccactcaacgagagaattccagaacatcctgtgcccagcgggacaatcccaaagcctccagaacctcctctcccaatagagccacacgagacaaccccagaacatcctgcgcccagcgggacaatcccagagcctcctctcccagtagagctacacgagacaaccccacaacatcctgtgcccagcgggacaatcccagagcctccagaacctcctctcccaatagagccacacgagacaaccccagaacatcctgtgcccagcgggacaatcccagagcctcctctcccagtagagctacacgagacaaccccacaacatcctgtgcccagcgggacaatcccagagcctccagaacctcctctcccaatagagccacacgagacaaccccagaacatcctgcgcccagcgggacaatcccagagcctcctctcccaatagagctgcacgagacaaccccacaacatcctgtgcccagcgggacaatcccagagcctccagaacctcctctcccaatagagccacacgagacaaccccagaacatcctgtgcccagcgggacaatcccagagcctcctctcccaatagagctacacgagacaaccccacaacatcctgtgcccagcgggacaatcccagagcctccagaacctcctctcccaatagagccacacgagataaccccagaacatcctgtgcccagcgggacaatcccagagcctcctctcccaacagaaccacccaacaagacagccccagaacatcctgtgcccgacgggacgatcccagagcctcctctcctaacagaaccatccaacaagagaaccccagaacatcctgtgccctacgggacaatcccagagcctcctctcccagcagaaccatccaacaagagaaccccagaacatcctgtgcccaacgggacgatcccagagcctcctctcctaacagaaccacccaacaagagaaccccagaacatcctgtgcccgacgggacaatcccagagcctcctctcgcaacagaaccatccagcgagacaaccccagaacatcctgtgcccagcgggacaatcccagagcctcctctcctaacagaaccatccaacaagagaacctcagaacatcctgtacccgacaggacaatcccaggacctcctctcccaatagagccacacgagacaaccccagaacatcctgtgcccagcgggacaatctcagagcctcctctcccatcagagccacccaacaggacaaccccagaacttgtattcaacagaacatccccagatcatcttctacccaacaagacaaccctaaaacctcttgtaccaaacgagataacctcagacccacttgtacacagcgggaccgcacacagtccttttcctttcaacgagacaaccctggaacctcctcatctcaatgctgcacccaaaaggagaatctgagaccatcatctccccaccgctccactcaatggaacaatcccaggaattcatctccccatcgtactaacaaagacatcccctgggcctcgtttcccctccggccaactcagagtgatggtccccgaacctcttccccatctcgctccaagcaaagcgaggttccctgggcatccatcgccctccggccaacccaaggtgacaggcctcagacatcctctcccagcaggccagcccagcatgacccaccccagtcctcctttggccccacccagtacaacttgccatcccgggccacctcttcctcccataacccaggccaccagagcacctcccgaacttcctcacctgtgtaccccgctgcctatggggctcccctgacctctcctgagccctcccagcctccatgtgctgtgtgcattgggcaccgggatgcccctcgagcctcttcgccccctcgctatttgcagcacgaccccttccccttcttcccagagccccgcgcccctgagagtgaaccgccccaccacgagcctccctatataccacctgctgtgtgcattggacaccgagatgccccccgggcgtcctcgcccccccgccacacccaatttgaccccttccccttcctcccagacacatcagatgccgagcatcagtgtcagtccccccaacacgagccccttcagctccctgcacctgtgtgtattgggtaccgagatgcaccccgggcctcctccccaccacgccaggccccagagccttccctcttattccaggacctccccagggccagcacagagagccttgtcccttccatggactctctgcacgagtgcccccacatccccacccctgtgtgcattgggcaccgggatgcaccctccttctcatccccaccacgccaggctcctgagccatccctcttcttccaggatccccctggaactagtatggagagcctggccccctccactgactctctgcatggctccccagtgctgatcccccaagtgtgcatcgggcaccgggatgcaccccgagcctcctccccaccccgccacccacccagtgacctagcgttcctggcaccctcaccttcaccgggcagctctgggggctcccggggctcagcgcctcccggggagaccaggcacaacttggagcgggaggagtacactgtgctggccgacctgcccccacccaggaggctggcccagagacagccagggccccaggcgcagtgcagcagcgggggccgcacccacagccctggccgtgcagaggtggagcgcctcttcgggcaagagcgcaggaagtccgaggcagcgggggccttccaggcccaggacgagggacggtcacagcagcccagccaaggccagagccaacttctccgaagacagtccagccctgcccccagcaggcaggtgaccatgctccctgccaaacaggcagaactgacccggcggagccaagcagagccccctcatccttggagtcctgagaagagacctgagggagatcggcagctccaggggtccccgctgccccccaggacatcagccaggacccctgagagggagctgcggacacagagacctctggagagtggccaagcaggcccaagacagcctctgggggtgtggcagagtcaggaggaaccgccagggtcccagggccctcatagacacctagaaaggagctggagcagccaggagggaggcctgggccctgggggctggtggggatgtggagagcccagcctgggggcagccaaagccccggagggagcatgggggggcacttccagggagtacaaggagagctgggggcagccagaggcctgggaggagaagcccactcatgagctccccagagaactaggaaagagaagcccactcacgagcccccctgagaactggggaggccccgcagagtcctcacaatcctggcactctgggacacccactgctgtgggctggggggcagagggagcgtgtccatacccgcgtggctctgagaggcgacccgagcttgactggagggatctgcttggccttctccgggcaccaggagagggggtctgggcccgtgtccccagcctggactgggagggcctcttggagctcctgcaggccaggctgccccgcaaggacccagctggacacagggatgacctggccagggctttagggccagagctgggtcccccaggcacaaacgatgtccctgagcaggagtcacacagccagccagaaggctgggccgaggccaccccagtcaatggacacagccccgcactgcagtcccagagcccggtccagctgcccagccctgcctgcacctccacccagtggccaaagatcaaagtgacaagaggaccagcgaccgcaactctggcaggcctggagcagacgggccccctggggagcaggagcactgcgaagggccccagcttgccagagctgcagttccaaccagaggagcctgaggagtcagaaccaagcagaggccaagaccccctgactgaccagaagcaggcagactcggcagacaagaggccagcagagggcaaggctgggagcccgctcaagggccgactggtgacctcatggcggatgcccggggaccggcccacgctgttcaatccgttcctgctgtctctgggggtcctcaggtggcgaaggcccgatctgctcaacttcaagaagggatggatgtcgatcttggacgagcctggagagcctccctccccctcgctcaccaccacctctacttcgcagtggaagaaacattggtttgtgctgacagattcaagtctcaaatattacagagactccactgctgaggaggcagatgagctggatggtgagatcgacctgcgttcctgcacggatgtcactgagtacgcggtgcagcgcaactatggcttccagatccacaccaaggatgctgtctataccttgtcggccatgacctcaggcatccggcggaactggatcgaggctctgagaaagaccgtacgtccaacttcagccccagatgtcaccaagctctcggactctaacaaggagaacgcgctgcacagctacagcacccagaagggccccctgaaggcaggggagcagcgggcgggctctgaggtcatcagccggggtggccctcggaaggcggacgggcagcgtcaggccttggactacgtggagctctcgccgctgacccaggcttccccgcagcgggcccgcaccccagcccgcactcctgaccgcctggccaagcaggaggagctggagcgggacctggcccagcgctccgaggagcggcgcaagtggtttgaggccacagacagcaggaccccagaggtgcctgctggtgaggggccgcgccggggcctgggtgcccccctgactgaggaccagcaaaaccggcttagtgaggagatcgagaagaagtggcaggagctggagaagctgcccctgcgggagaataagcgggtgcccctcactgccctgctcaaccaaagccgcggagagcgccgagggcccccaagtgacggccacgaggcactggagaaggaggttcaggctcttcgggcccagctggaggcgtggcgtctccaaggggaggctcctcagagtgcactgagatcccaggaggatggccacatccccccgggctacatctcacaggaggcatgtgagcgcagcctggcagagatggagtcctcgcaccagcaggtgatggaggagctgcagcggcaccacgagcgggagctgcagcgcctgcagcaggagaaggagtggctcctggctgaggagacggcagccacggcctcagccattgaagccatgaagaaggcctaccaggaagagctgagccgagagctgagcaaaacacggagtctccagcagggcccggatggcctccggaagcagcaccagtcagatgtggaggcactgaagcgagagctgcaggtgctatcggagcagtactcgcagaagtgcctggagattggggcactcatgcggcaggctgaggagcgcgagcacacgctgcgccgctgccagcaggagggccaggagctgctgcgccacaaccaggagctgcatggccgcctgtcagaggagatagaccagctgcgcggcttcattgcctcgcagggcatgggcaatggctgcgggcgcagcaacgagcggagttcctgcgagctagaggtgctgcttcgcgtaaaagaaaacgaactccagtacctaaagaaggaggtgcagtgcctccgggacgagctccagatgatgcagaaggacaagcgcttcacctcgggaaagtaccaggacgtctatgtggagctgagccacatcaagacacggtctgagcgggagatcgagcagctgaaggagcacctgcgtcttgccatggccgccctccaggagaaggagtcgatgcgcaacagcctggctgagtag

SEQ ID NO: 30 - protein, 593 aa, Homo sapiens
MTPDLLNFKKGWMSILDEPGEPPSPSLTTTSTSQWKKHWFVLTDSSLKYYRDSTAEEADELDGEIDLRSCTDVTEYAVQRNYGFQIHTKDAVYTLSAMTSGIRRNWIEALRKTVRPTSAPDVTKLSDSNKENALHSYSTQKGPLKAGEQRAGSEVISRGGPRKADGQRQALDYVELSPLTQASPQRARTPARTPDRLAKQEELERDLAQRSEERRKWFEATDSRTPEVPAGEGPRRGLGAPLTEDQQNRLSEEIEKKWQELEKLPLRENKRVPLTALLNQSRGERRGPPSDGHEALEKEVQALRAQLEAWRLQGEAPQSALRSQEDGHIPPGYISQEACERSLAEMESSHQQVMEELQRHHERELQRLQQEKEWLLAEETAATASAIEAMKKAYQEELSRELSKTRSLQQGPDGLRKQHQSDVEALKRELQVLSEQYSQKCLEIGALMRQAEEREHTLRRCQQEGQELLRHNQELHGRLSEEIDQLRGFIASQGMGNGCGRSNERSSCELEVLLRVKENELQYLKKEVQCLRDELQMMQKDKRFTSGKYQDVYVELSHIKTRSEREIEQLKEHLRLAMAALQEKESMRNSLAE

SEQ ID NO: 31 - protein, 1144 aa, Homo sapiens
MIPRRPREGPRADSSQRAPSLLTRSPVGGDAAGQKKEDTGGGGRSAGQHWARLRGESGLSLERHRSTLTQASSMTPHSGPRSTTSQASPAQRDTAQAASTREIPRASSPHRITQRDTSRASSTQQEISRASSTQQETSRASSTQEDTPRASSTQEDTPRASSTQWNTPRASSPSRSTQLDNPRTSSTQQDNPQTSFPTCTPQRENPRTPCVQQDDPRASSPNRTTQRENSRTSCAQRDNPKASRTSSPNRATRDNPRTSCAQRDNPRASSPSRATRDNPTTSCAQRDNPRASRTSSPNRATRDNPRTSCAQRDNPRASSPSRATRDNPTTSCAQRDNPRASRTSSPNRATRDNPRTSCAQRDNPRASSPNRAARDNPTTSCAQRDNPRASRTSSPNRATRDNPRTSCAQRDNPRASSPNRATRDNPTTSCAQRDNPRASRTSSPNRATRDNPRTSCAQRDNPRASSPNRTTQQDSPRTSCARRDDPRASSPNRTIQQENPRTSCALRDNPRASSPSRTIQQENPRTSCAQRDDPRASSPNRTTQQENPRTSCARRDNPRASSRNRTIQRDNPRTSCAQRDNPRASSPNRTIQQENLRTSCTRQDNPRTSSPNRATRDNPRTSCAQRDNLRASSPIRATQQDNPRTCIQQNIPRSSSTQQDNPKTSCTKRDNLRPTCTQRDRTQSFSFQRDNPGTSSSQCCTQKENLRPSSPHRSTQWNNPRNSSPHRTNKDIPWASFPLRPTQSDGPRTSSPSRSKQSEVPWASIALRPTQGDRPQTSSPSRPAQHDPPQSSFGPTQYNLPSRATSSSHNPGHQSTSRTSSPVYPAAYGAPLTSPEPSQPPCAVCIGHRDAPRASSPPRYLQHDPFPFFPEPRAPESEPPHHEPPYIPPAVCIGHRDAPRASSPPRHTQFDPFPFLPDTSDAEHQCQSPQHEPLQLPAPVCIGYRDAPRASSPPRQAPEPSLLFQDLPRASTESLVPSMDSLHECPHIPTPVCIGHRDAPSFSSPPRQAPEPSLFFQDPPGTSMESLAPSTDSLHGSPVLIPQVCIGHRDAPRASSPPRHPPSDLAFLAPSPSPGSSGGSRGSAPPGETRHNLEREEYTVLADLPPPRRLAQRQPGPQAQCSSGGRTHSPGRAEVERLFGQERR

SEQ ID NO: 32 - protein, 2365 aa, Homo sapiens; identical to SEQ ID NO: 28

SEQ ID NO: 33 - DNA, 79569 bp, Homo sapiens
cttccacctcccgagcatcgctctgattcattgttaaaataaagaggccatgaccctggcactcccaccccggcagcccctgtgcgtggaaacccagccaaggttagcactgggcctcagaaaagaggagctggtagggggaggcctacaggaggggtaggggtcgagggatccggggaggaactggctgaatgcctggatggagagggtcccgggtccattctctgggtggggcatgtgtagctgcttaaggttttgattattatatccacatctcaagtgcattttagagaaggattctgcctattggttgtgggtaggggaggaaacgggagcagcgaggggcacgtggagtagagccccctacccacccccaggaaaatgagcggcgttctcctgctaggcgacgctcctttatgtggccagaccaggagagaaacgcccaggacgggcggggccgatgcgcccctcttccaccaccaggagtcgggaggacgaccgcccggggaggatcagagaccctggggccacggaaggaccagtgggtagccctctccccaccgtgccttgctgtcgcccccaccgcattcccttctccaggtctgatgatggaggagccttggccctggctgtcccaggggaggaggtgaaattcctcagctctccaccaagattggccacaaaagcctgatcccctggaacacagcaggtgaggatggatgtgggcaggtgacctgggggcaccaaaagctgcaggtgttttgggatgttgggttcctcccaccccccaccctccccctggggctctgtgtgagtggggaggccatctttaagtgattctcctgacccagctccactccagggcatggatgttggtggccttaggggcacccagaaaggagaacccttgcacaagtaagataccagggcggccgggcgcggtggctcaagcctgtaatcccagcactttgggaggtcgaggtgggtggatcacaaggtcaggagttcgagaccagcctggcccatatggtgaaacctcgtctctaccaaaaatacaaaaaaattatccgggcatggtggcacatgcctgtaatcccagctatttgggaggctgcggcaggagaattgcttgaatccgggaggcagaggttgcagtgagccgagatcgcgccactgcactccagcctgggtgatagaccgagattctgtctcaaaaaaaaaaaaaaaaaaagaaagaaagacaccagggtttcagaagggtatgatgcttcacacctgtaatcccagcactttgagggaaggaggaggattacttgaggtcaggagttcaggagttcaaaaccagcctgggtaacactgcaagagccttttttttttttttttttttttttgagacacactgttgcccaggctggagtgcagcggggcgatcttagctccactgcaacctccacctcctgggttcaagcaattctcttgccccagcctcttgagtagctgggattacaggcatgcgcaccacgcccagctaatttttatagttttagtagagacagggtttcatcatgttgggcaggctggtcttgaattcctggcctcaagtgatctgcctgcctcagcctcccaaagtgctgggattataggcgtgagccaccgcacctggccaagagcccatttttacaaaataaaaaagaaaaaaattagctgggcgtggtggcgtacacctgtagtcccagttactcagtcccagagactgaggcaggagaatcatttgagcccgggagtttgaggttgcaaggagctatgatcgagccactgcactccagcctgggtgacagagcaagaccctgcccccacctccccaaaaaagacattaggggccggatgcagtggctcacacctgtaatcccagcattttgggaggccgaagggggcggatcacctgaggtcaggagttcacctggccaacatggcgaaaccccgttgctactaaaaatacaaaaattagccaggcatgacggtgcatgcctgtgatcccagatactactggggaggctgaggtagaattgcttgaacccaggaggcggaggttgcagtgagccgagtgagccaagatcacatcacggcactccagcctaggtgacagagagagacttcgtctcaaaaaaacaaaacaaaacaaaacgaaaacacattaggatttctttttggctaagttctgccacaaacttgctgtgtgactttaggctgttcacgtttgtcaaagacgtcgtcctcaactctgaaaatacctggccagctttttgcctccctcgctgtgcttcccaagggacctgtgcgagttggcagtatgatccagtgctcctcacttccacctccgagagagcagggacacacacagccctggatttgaatcagccactgcgaccttcagtgaccgaaggaacctctctgagccttagttgcctgatctaaaattggcattaatttgatctacaatgcagctataagacaaggacactcaaactttggggcgcactagaatcacctggggaatcactttttttttttaagacagagtctcactcttatcacccaggctggagtacagtggtgcaatcttggctcactgcaacctccgcctcctgggttcaagtgattctcctgcctcagcctcccgagtaactgggactacaggtgcataccaccatgcctggctaattttgtatttttagtagagacagggtttggcaatattggccaggctggtctcgaactcctgacctcaggtgatctgcccgcctcggcctcccaaagtgctgggattataggcgtgagccactgcgcctggccaggaatcgcttctttattttcattttcatttatttatttatttatttatttattttgagatggagtctcgctctgttgctcagtctggagtgaagtggcgtgctctccgctcactgctacctctgcctcccaggttcaagcgattctcgtgcctcagcctcccaagtagctgggactacaggtgcgtgctaccacgcccagctaatttttgtatttagtagaggcggggtttcaccatgttggccaggctggtcttgaactcctggcctcaagtgatctgcctgcctcagcctcccaaagtgctgggattacaggcgtgagccaccgccctcggctggaatcacttctttaacatgcacagccccagacctcagtctcttggagattctaactgtgtgaattgggagagagaaaggggaatctagattttttttttttttttttgagatgtggtcttgctatgttgcctaggctggagtgctgtaactattcacaggtgcagttatagcacactaccacctcaaactcctgggctcaagagatcctcccacctctgcctcccgagtagcttggactgcaggtgcacaccatcttacccagctgaaatctgctttttttttttctcagtgcagtggcacagtcatggctcactgcagcctcgacctcccagactcaggtgatcctcccaacttcagcctcctgagtagcagggaccacaggcctgcaccaccttgcccagctaatttttgtattttttgtagagacggagtttcgccagttgcccaggatggtcttgaactcttgggctcaaatgatccgccgcccgcaatgggcccagctggaatctgcatttttttgttttttgttttgagatgaagtctcactctgtcgcccaggctggagtgcaatggcgcaatcttggctcactgcaacctccgcctcctgggttcaagccattctcctgcctcaggctcccaagtagctgggattacaggcacgtgccatcacacttggctgatttttgtatttttagtagagacagggttttaccatattggccaggctggtctcgaactcctgacctcaagtgatcggcccacctcggcctcccaaagtgctgggattacaggcatcagccactgtgcctggcctggtatctgcatttttatgaacagcccaggagggtgtaatgcagagtccttggcgtgcactttcagcaacactgcagtaaggactagaaatcgcacatcaaatgctggcagagtgcctggtgcttagtaggtgcttagtgagtgtttgttgagtgaataaatgaacaggaatggatggagaacaggaacccaaaggaatggatgagtaaccttatttccttggtccttgtctggaaactggggcaactggggctggggttcaggtgagtggccagccagtcatctggtctttgcctccccctcatttttgccaggcctcacatagacggtcagccattggatcataggaactgccctggcctgactcacccaatatggaggaggtgcctggggatgccctgtgtgaacactttgaggccaacatacttacccagaaccgctgtcaaaactgcttccaccctgaggaggcccatggagcaagataccaggtgggccagttttccacgtggttggggtggtttgtgatgggggcatgggtgaaggactgggcctgtggtgtccgctaactcgcagttgaacccagatgctggacttcctcctgtcgagagcctcggttttcccacattgcagggaagtggttgaaccatgtgaatgtttcacaatcttcagtcactttcctcctgcttatatgatacgattgttaccatagccttatctaatctgttacttactttgttattctttaaatcaacatctttttccccttctattgaaacaaaacttcacatcatcaacacaagtagaaaactagaattacttcctgttaagaagaagaggttaagaagaaaggtagaggctgggcacggtggctcacgcctgtaatcccagcactttgggaggccgaggtgggtggatcacccgaggtcgggagtttgaaaccagcctggccaacatggtgaaaattagctgggcatggtggtgcatgcctgtaatcccagctacttgggaggctgaggcaggagaatcacttgaacctgggaggcggagattgtggtgagccgagatcgcgccattgcactccagcctgggcaacagaatgaaactgtctcaaaaaacaaaacaaaacaaaacaaaaaagagaagaaaggtagaaaaagaaaaaacaaaacagaaatgtcgttacaccctaacttgagagtgttttctttttctttttcttttttttgagacagagtctcactctgtcgcctgggctagagtgcaatggcaatggtgtgatctcagctcactgcaatctctgcctcctaggttcaagcgatcctcccgcctcagcctcccaagtattgggattacaggtgcctgccaccatgcccagctaatttttgtatttttagtagaaacggggtttcgccatattggccaggctggtcttaaactcctgacctcaggtgatccacccgcctcagcctcccaaagtgttgggattacaggcgtgagccaccgcgcctggcctcgagagtgttttctatggaaggctctgagcttgcatcctgctgtctctttgtcaaaaagggagattagcagatgttagagagatgttaagaatacaccagcatcatctagagattttctttctctctctcttttttttttttttttttttttttggagatagggtcttgctctgtagcacaggctggagtgcagtggtccaacctatagtacatggctcactgtagcctcgacctcccaggctcaaatgatcttcccaccttggcctcctgagtagcagggactacaggcacatgccaccatggccagctaattttcttgtaaagatgggatctcactatgttgccagggctggtctcaaattcctgggctcaggtgatcctcccacctcaacctctgtaactgcagggattacaggtgtgagacactgcacctggtctcaagattttcttcttcaagttattgaaggagtgaagaagaatccttttttttctttctttttttttcatttgagacggagtctctctctgtcgccaggctagagttcagtggctcaatctcagctcactgcaacctccgtctcctgggttcaagcaattctcctgcctcagcctcctgagtacctgggattacaggtgcccaccaccatgcccagctaatttttgtatctttagtagagacagggtttcaccatgttggtcagtctggtctcgaactcctgaccttgtgatctgtctgcctcggcttcccaaagtgctgggattacaggtgtgagccaccgcgcctggccgagattttcttcttcaagttattgaaggagtgaagaagagtccttttctgactttgtgattgatgtagtctgctgccaagcccccatgcatgtaaacacagagcacctgatacacacgcaatgagaaacctgggactcacgaacctccgagggcccttccaaccttgaccaccatggcttcgtcattcccattggggtctgaaggtcctctttttttttttttttttttgagacagagtctcgttctgttgcccaggctggagtacagtggtgcgatctgggctcactgcaagctcggcctcccaggtttatgccattctcctgcctcagcctcatgagtagctgggacaacaggcacccggcaccacgcccagctaattttttgtctttttagtagagacagggtttcaccatgttagccaggatggcctcgatcttcctgacctcgttattcgcccacctcgacctcccaaagtgctgggattacaggcatgagccaccgcgcccagcttctaccagtcttgatacctccaataatagctctcttgtgctcacctgcaagttcaggttcagggaacagatgcctgggagtccatctttcatgcaaatgactttcttccagtggttgggaagatggcaagaatggaacaggagagccgtggattcaggctcgtctgagttctagtctcaatcccaccatttcccacccgagaccgtgggtcagctcacaaattcatacgtactgaataggtgcttaaaatgtgccaggcattatgctagatgatggggaaatcatgataaatcagaaaggcacagccaggcacagtgactcactcctgtaatcccagcactttgggaggccaaggtgggtggatcacttggagtttgagaccatcctggcaacatggcaaaaccccatctctacaaaaaatttaaaaaattagctgggcgtagtgggatgcggctatagtctcagttactcaggaggctgaggtgggagaatcacctgagactgggaggcgggggcttcagtgagccgtgatcgcattactgtatttcagcctgggtgacagagttggaccctgactcagaacagaacagaacagaacagaacagaacagaacagaacagaacagaacagaacagtacagaaaacagggagaaggaggggaagggggaggggaagggggagggggagagagaggaggagaggaggagagagggacacatccctggcttgtcttcatggggcttatattctagcaagagaaatgcacatgattatttaatcttggttgtgataaatgtataaaggaacagtaagtggcatgaaggtaaaggatagggcattagggaaagtttctccaaaaaaaaaaaaatgacatttcagctgcttagtaaaggctgtgcaggcattagcattagtgaaattgcaggaagaggagaggaaggaaggagaatgtgcaaaggccagcctggcacggcagctcacgcctgtaatcccagcactttgggaggaagtgcttggattgaggcaccgaagcaggaagatcacttgaactcaggagtttgagaccagcctgggcagcacagtgagaccccatttctaccaaaaaaaaaaaaaaaaaaattagccaggcaggatggtgcacacctgtagtcccagctagtcagaaggctgatgtgggaggattactggatcccaggagttcaaggttgcagtgagccatgagcatgccaatgcactccagcctgggcaacagaatgagaccttgtctcaaaaacaaaacaaacaaacaggtcaggtgcagtggttcatgcctgtaatctcagcactttacgaggccgagacgggtggatcacctgaggtcaggagttcaagaccaccctggccaacatggtgaaaccccatctctattaaaaatacacaaattagctacatgtggtggtgggtgcctgtaatcccaggtacttaggaggctgaggcaggagaatctcttgaacccaggaggcagaggttgcagtgagccaagattgcaccactgtactccagcctgggcaacagagcgagaatcctctcaaaacaaaacaaacaaacaaagaatatgcaaaggccctgaggcagaaaggaggctgcacatcgggctggagaggacaggcaagaggggggcacagaggagctataggacaaggatggagaatggggggaggcctggtctcactggccttgtgcggctttgtggacatgttgaggacttaggattctgaggtttttttctgttttgtttttgtttttttttgagatggagtctcgctctgtcgcacaggctggagtgcagaggcgtgatctcggctcactgcaacctctgcctcccaggttcaagcgattctcctgcctcagcctcccaggtagctgagactacaggcatgtactaccaaacccagttaatttttgtatttttagtagagatggggtttcaccatgccgctcaggctggtcttgaactcctggcctcaagcaatctgccctccttggcctcccaaagtgctgagattacaagtgtgagccacctcgcccggccaagccacggaagatttcaaataagggagtgacgtgctctgatttgcatttttcacagtcactctgattgctgggcagagagaatggagggcagggtggtgagagtgaatcaggtgacccgccaggaaaaggtgcacgtactcatcggtgccagagatgattggggctttgagatggaggcaaatggacacatttccgaactaattgagcaggcacgtctacaggatttgggggtgagggaggggagaaacccatggctgactcctgtaatttcttcaggcagggtacttgggttgggaggtctgtttggagttgtctggggcatggtgtggggtgtcggcaggatacagtggagatgagggggaagttagtgaattggtggggctggagctcagagccagaccatcacaggagatggaggcctgcgagtcttcaggatctgtcactgaccaaagtcttgctcacggatgagcctatcatctgtggaagaaagtgtggaatgagatgagaacaggcctgggtggaggccagggaatcagcagagacagccaagaaggccagaggctaggaggcaaaccccacagtgtgcccctcctccccaggagccaagaccagagatggtttcaagagagggggccaggcacaatggctcccgcctgtgatcacagcactttaggaggctgaggctaaaggatggcttgaaaccaggagtttaagaccagcctagttaacaaagtgagatcccatctctacaaaacaaaaaatgaactgggtgtagtggtgcatgcctgcagtcccagctacttgggaggctgaggcaggaggattgtttgagcccaggagattgaggctgcagtgcactgtgatcatgccactgccacagcaagactatcttaaaaaaaaaaaaaaaagatcagagaggggcacgacatcaaatcctccactttcttgagcttccagttgctctgatgatgatcaaggctgtgaaactctcctttggcaaatgcatgaggggtgactgttgtgtctccgagccaggccctgggacccaactctgggcaggtagcagctccctgtgtataccagatgtgatagtaaaaaactgacactgggccgggcgcggtggctcacgcctgtaatcccagcactttgggaggccgaggcgggtggatcacttgaggtcaggagtttgagaccagcctgactagcatggtgaaatcctgactctactaaaaatacaaaaatacaaaaattaacagggtgtggtggcggatgcctgtaatcccagctactcgggaggctgaggcaggagaatttcttgaatccgggaggcggaggttgcagtgagccgagatctggccaccgcactccagcctgggcgacaagagcgaaaaactccatctcaaaaaaaacaaaaaaacctcctgggccccagaagatggcaactgcctcttccagcctcttccacctgcctgcctgtgcactcctctgccactctggacctattccatggtgccacgtggtcaggcattgaaggaatgggtgggttttttttccatcaccctcagatgctgctgctggggttggggcgggtcttccctggctgactctgtctgcctcacccactctctccccatctctctgtcaccacaggtctccagggaccaaatttagcccatttttcctccaaggattctggacccttggccatatttgcctctagctttaggtcaacagatttctaacatggagtcaaaaaatctgtatgtttaaaaaaaaaaaattggctgggagtggtggctcacgtctgtaatcccagcactttgggaggccgaggcaggtggatcacctgaggtcaggagttcgagaccaccctggccaacatggtgaaaccccgtctctactaaaaatacaaaaattagctgggtatggtggcggacccctgtagtcccagctactcaggaggctgaggcaggacaattgcttgaacccgggaggcagaggttgcagtgagctgagatcgcgccattgcactccagcctgggtgacagagtgagactctgtctcaaaaaaaagaaaaaaaaaaaaaaggccgggcgtggtggctcacggctgtaatcccagcactttgggaggccgaggcgggcggatcacgagatcaggagatcgagaccatcctggctaacacggtgaaaccctgtctctactaaaaatacaaaaaattagctgggcatggtggcgggcgtccatagtcccagctactcgggaggctgaggcaggagaatggcatgaacccgggaggcggagcttgcagtgagccaagatcacgccactgcactctagcctgagcgacagagtgagactccgtctcacaaaaaaaaaaaaaaaaaaaaattgaggccaggcacagtggctcatgcctgtgatcccagcactttggccgaggcaggcagatcacctgccatcaggagttcgagaccagtctcgccaacatggcaaacccctgtctctactaaaaatagaaaaattagccgggcatggtgtcgggcacctgtaatcacagctactggggtggctgaggcagaagaattgcttgaacccaggaggcgaaggttgcagtgagccgagactgcaccattgcactctaacctgggctataagagcgagactctgtctcaaaaaaaaagccctttacaaatattaactcgtttaattctcagaacacccctaggaggtgggtcctgctatcctgccggttttgtagatgaggtaactgaggcacagagaggataagtcacgtggcccaggtcttggtcgcttctcagcctccatttccgagaggagaaaacaatgctccgaaaggggaagtcatcggcctgaggtcaccagccgggaaccggaggagccaggatggggcccgaggtccatctgaggccagagccagtgctgacccgccagacaggaaatcagagctggggactgaccgtggggcccactcaagtgggtggtgtggggtggtgacgggggctggggtgaaagccaggatgaggtgtcacattaggctagggttcctgctgggcctggcggggcagagacccctggttgatgcctggcaagtctctcctcatttctgctgtgctgtcccctgggtggccaaggcgccaggcccggctgtggatctgacacctcctgctgccgagctctgatcagaatctggctgcagggcagggggtgaaactgaatcccaccaggcctcccctggcctggatgtcacggcagacatcccaaccccacttcttggcactgcctgaccccagcagtggccttcttggaacctggagagcctgtgcccaccctgtggtgccgaccaggctgctgccttggccctgggctctgggctccagggtccccagggatcccaggcccaggctcttgcccctcccggctctcaggtgagctgctgggatcgggttcctgcggtttcatgtctttcattgttcttggctggggcccggcttatgaaactgtaatgaggggcccctgctcccgaagccggcccctctaaggtttccactgcctcggcggctgctgccaccacagcccggagtcggggcctgggagggcagcagtgtgggggcctgagccggagccccccggggacgagggtgctgacagtcgacagccaccaccaccaccagagcccgcagcccaggtaatccgagaggaggcggggcgcagggtgccatggccgctgtctcccaccaccaggggagggaactgccgctctccagaggtggggaggaattggggggggccctggaggtgagcagccgttcccccctggtgagcccagcaccagaccagccttcacaggtgtggccttgccaaaggtggagggagagaggagtgggcagctggctctagcccccgcccttttcctggggccttgaccctccagccctggatcccctgcctctcctttagtggggcaaatctcttctgtcctccaagaccttgctttcccatctcctctaccatcaaactgcctcttcctccctcagacctctcccttctctcagccagcctaatccttcctcctcgcccttgtcttttggccgcaaaagaccctggtggatccttctatccacctcgttctggggcgcacgcacatacatgcatgtatacatgaagttgcactcatgcaaacgtacagatcggtgtacccgcgggacctgcgtagacacgcatgcgcaagagctcgctccacctatgtgcacacatgtgcccccaataccaggcctttatccacacacatacctgctccaaggcccatatgtgtacactcacgtgtgcaggcacacaccaggtacctcagccagccctcggcttgagtcccaaggggtgcttctagcctgatgggcagctccttgagaagtgcaggatcccccgaggagatgcctggagactcccacgccaccgggaggggctgtgcagggggaggggagcccccacgtgggcgctgagctgtctcctctctccaaccctggcccaggagctcaggagcccttcaggtgctgaggtgccctactgcgacctgcctcgatgtccacctgcccctgaggacccactcagcgcctcaacctccggctgccagtctgtggtggacccaggcctcaggccagggcccaagaggtgggtagagtcccagggcccaggaagggcttcatggggtggaatgccctcacccttcccatttgcactccttccccaaggcagcacctgtctctaatggctgctggcatgggtcacgtggtcagtcctctaaacctaggcacaggtgggtggtgggcatgctccttgggcccacaggaagaactcagatcacaccaccctgtttgcacttcagtggctgagcctcccctccccagtcctggctgtctctcccaggggccctgcccaccccataacctcccaagaccgagctcagctttgccccagggtgtgtggctgctgtacactcaccttgcagtgggcatggccacagcctactcacatttcctggttccctttgcacagctttaaaagattaaacagtccctgcacccaggggcacctgctgtcacccacctacgtgggtgtgcactgctccaggctctggggttccttccaccctcaggcctgagtggcagtccccctttaaggtcatggtaccttgggaggccatggtctgagagtctagaaacctgggttccagcttcagatccatccctgatgggtcttgagcaagttactctgtctttctgtgtctcagtttccctctctgtaaaataagagggattgaattaaatcagcattgtgctgggatcattcatgtgctcctcacaggtaggcatattaaaacaaacaaacaaacaaaaaaacagcctgggtgcagtggctcatgcctgtaattccagaactttgggaggccaaggtgggcggatcacttgaggtcaggaggtcgagaccagcctgaccaacatggcgaaaccctgtctctactaactatacaaaaattagccaggcatggtggcaggtgcctgtaatcccagctgctcgggaggctgaggcaggagaaccacttgaacccgggaggcagaggttgcagtgagttgagatcgtgccattacactccagcctgggtgacacagcgaggctccgtctcaaaaaaaaaaaaaacaacaaaaaaaaaaaacaaaaaaaaacccacaaaaaaacgaaaaaaaaaacaaagacagctttgttatcaagtatgtttcagaaagtctgggataaatgaagttgaatagctttcctgcaggacttgtcagagcctttagcttgcctgcgtgcatcgtggcttttgggtaacggaagtagagaagtatgtcatttgactacagagctcttttttatggccatcacttattatcatcgtgtaggccagtctgtgggtcactctttggggatactgccagcgctaagccttcttgagcctgtgacttcttttaaagcagagccttctctgcagctccctccctcagcatctgggctagtgaacccgtcaatgcctgtggagccatgctgcctctcacatcctcgttagccaagcatgagtctgtcttcttagacttactgaacttggggtcagtagactaagactaagacttaaagttggggctggggcaatagttttggttcataacacagctctgccctttcctatctcggtgaccttggccagtctcttgacctctctgagcctcagtgtcttcctctgtgaaatgggaattattattattattattattttgagatggcatcttgctctatcacccaagctggagtgcaatgacacgatgttggctcactgcaacctcagcctcccgagtagctgggattccaggcatacaccaccacacccgactaatttttgtatttttatttatttatttttgagatagagtctcgtgctgtcacccaggctggagcgcaatggcacgatcttggctcactgcaacctccacctcctggcttcaagcgattatcttgcctcagcctcctgagtagctgggattacaggtgtgtgccaccaccatgcccatctaatttttttatttttagtagagacggggtttcaccatgttggacaggctagtctcggactactgacctcaggtgatccacccaccttgacctcccaaagtgctaggatttcaggtgtgagccactgcgcccggcctaaaatgggaattattatacttactttaaagggatgctgttgctgggcgcagtggctcacgcctgtaatcccagcactttgggagtccgagacgggcggatcacgaggtcaggagatcgagaccatcctggctaacacggtgaaaccccatctctactaaaaaatacaaaaaattagccaggcgtggtggcgggcgcctgtagtcccagctactggggaggctgaggcaggagaatggcatgaacctgggaggcagagattgcagtgagccgagatggtgccactgcactccagcctgggtgacagagcgagactctgtctcaaaataaataaataaataaataaataaataaataaataaataataaaattacaaaaaaaaaagggatgctgttttagctcaatgaggcaatccatataaaaagtctgacacagaggcagctctcaccattggctccctttcccacaccagcgtgtgggccccaggctccctgtgtgagtgagtgcatatgcctgggtggggtgggggatgctcctaactccccattactttttgggtctgtctcctctcccaggggcccatccccctcagcagggctcccagaagagggtcccacagctgcccccaggagcaggagccgggagcttgaggcagtaccctatctggagggcctgaccacttccttgtgtggcagctgcaacgaggaccccggctctgaccccacctccagccctgactccgccacccctgatgataccagcaactcgtcctctgtggtgagccaggagtgggagtttgggggacaagagtggctcacacctccatctgcagccctgggtcccacctaaacctccaggccagggctgagcctcacaccagggaatccgacgaggtcctctggaccattagctggcagctcgggccaccccggcgaacccctggagagtggggatttctgcacaggctggcccagggcagctggggtctggctgtgaaaagacagggaaaggagtttcagccgacaggagctctgggtgaatcaccagcaggctcgggctgccacatgctctcagatcccagagtgttgggtttggtgtctagcgcaagagtggcacagggccccagggccctgccctcgacacacagtgctgagtcccatggccagccctggaatagatttccaagagacagaggaaagggagcaggctgcgggggtcatttaaccacgaaaagagaagagccagcagtctttcctccagcatttgcattttgaggggctgccgcagagcagaagagacaggcttgtcccaggagaccccccaaaaggaaaatgacagggggtggtgataagactcagaataaaacaacccagcctcacacgcttcatggccagctccatgctaagggcttggtgggtgtgggctcaggggagactcaccacagcctcagaagtggagatttcagtcgccccatatggggctgaggctcagcggggggagcaacttagtggaggccacacatctgggaagtagtggggctaggatttgaacccacttttctctggcccctggggctacctcacacagtcccacatgcggaactctgggactctgggcaaagctcttggcttcaatggatgtacatgcctcctaggtccgttgaagatgagcgacttggcacttagcacctgctagagcccagcacagtgccaggcaaacagcacatgcttttaatttaattgattgattgaagactgggtgcggtggctcacgcctgtaatcccagcactttgggaggccaaggtgggcggatcacctgaagtcaggagatcgagaccagcctggccaacatggtgaaactctgtctctactaaaaatacaaaaattagcagggtgtggtggtgggcacctgtaatcccagctacttgggaggctgagacaggagaatcgcttgaacccgggaggttgcagtgagcttagattgcaccattgcactccagcctgggcaacaagagcaaaactccgtcttaaatagagaaaaaaaaaaaagttgattgattgagacagggtcttgctccattgcccagactggaatgcaatgatgtgaacatggctcactacagccttgacttcctgggctcaagtgatccccccacctcagcctcctcagtagctgggactataggcatgcacaaccatgcctagttattattattttttttaattttgtagagacagggtctcactgtgttgcccagcctggaagtgctttttactgaggccatggagcggagtctacaccacagaaggtgtggcaccactcactgtcacctcttggggacagaacttgacagtttaggaagtgctttttattttttatttaattttatttatttttgagatggagtcttgctctgtcacctgggctggagtgcagtgccacaatctcagctcactgcaacctctgtctcccaggttcaagcgattcgcctgcctcagcctctcgagtatctgggattacaggcgcccaccactatgcctggctagtttttgtatttttaatagagacagggtttcaccatgttggccaggctggtttcgaactcctgccctcaggtgatccacctgcctcagcctcacaaagtgttgggattacaggcgtgagccactgcgccctgcagggaagtgctttgtttttttttgttttgtttttctttttgttttttgagacagagtctcactctgtcacccaggctggagctcagtggcgcgatctccactcaatgcaagctccacctcccaggttcacaccattctcctgcctcagcttcccaagtagctgggactacaggtgcccgccaccacgcccagctaattttttgtattttttagtagagatggggtttcaccatgtttcccaggatggtctcgatctcctgacctcgtgatccacccacctcgtcctcccaaagtgctgggattgcaggcgtgagccacagcgcctggccagggaagtgctttttaatgccaattcccttcccttccttctgcccctctcatttggagagtatatgtcctgcagccttttttctcccgcaaacatactttctcctccccttctctggcaggactgggacactgttgagaggcaggaggaggaggcccccagctgggacgagctcgcagtgatgatcccgaggaggcctcgggaggggccgagagctgacagctcccaaagggctccgtctctcctcaccaggtcccctgtgggaggagatgctgcaggccagaaaaaggagggtgagtccttctgccaggttggttcccatggtgatggcctggggccccccagatagccatctcactggccatttgggactctgggcacggcttactttggtggcctgagtgttaataatagtaacagtttgcatgtcatgatggagcagccacaatgagttatgctacccactttaattattattattattatttgggatggagtcttgctctgttgcccaggctagagtgcagtggtgtgatctcggctcactgcaacctttgcctccccagttcaagcgattctcctgccccagcctcccaagtagctaagattacaggctcccgccaccatgcccagctaatttttgtctttttagtagacatggggtttcaccatgttagcccagctggtctcaaactcccaaccttcagtgatctgcccatcttggcctcctaaattgccgggattacaggcgtgattacaggcacgcctagcctgttattattattattattactattattattttgagataagagtctcacactgttgcccagactggagtgcagtggtgccctcttggctcactgcaacctccgcctcctgggttcaagagattctcctgcctcagcctcctaagtacctgggattacaggcacccgccaccacacgtggctaatttgtgtatttttagtagagacagggtttcaccatgttggccgggcttgtctcaaattcctggctggggattacaggagtgagccactatgcctggccttagccaaggagtttggacttctctaaatagtagggagccaccgaaggtttttgaggaggaaagtcatgtaattaaacctgtgcctcaggaagttccctagatcaaagatgcaaaggatgaattggagcagggaggggttgaaggatgagaaaccagttaagagactgttgcaggcactgtagcaataactggttcaggcatgaatcactggcggatgcaaaatccctagggtgataatttgtcagcaaacaggatagtcatggtttcaaagtattgtgtccggaattggtgggttcttggtctcactgacttcaagaatgaagcggcagaccctcgcgatattacagttcttaaaggcggcgtgtctggagtttgttccttctgatgttcggatgtgtttggagtttcttccttctggtgggttcgcggtctcgctggctcaggagtgaagctgcagacctttgtggtgagtgttacggctcttaaggagacgcgtccgcagttgttctttcctccctgtgggttcatggtctggatggcttcaggagtgaagctgcagaccttcgtggtgagcgttacagctcataaaggcagtgtggacccaaagagtgagcagcagcaagatttattgcaaagagcgaaagaacaaagcttccacagcatggaagaggacccgagcgggttgccagagctggctggggcagcctgcttttattctcttgtctggccccacccacatcctgctgattggtccattttacagagagccgagtggtctgttttgacagggcgctgattggtgcatttacaatccctgagcttgacacaaaggttctccacatccccactagattagctagatacagtgtccacacaaaggttctccaagtccccaacagagtagctagatacagagtgtggattggtgcattcacaaaccctgagctagacacagggtgctgattggtgtgtttacaaaccttgagctagagacagagtgctgattggtgtatttacaatcccttagctagacataaaggttctccaagttcccactacactcaggagcccagctggcttcacccagtggatctcgttctggggctgcaggtggagctgcctgccagtcccatgccatgcgcccacactcctcagcccttgggtggttgatgggactgggcgctgtggagcaggggcggcgctcatcggggaggctcgggctgcacaggagcccacggaggcggggggaagctcaggcatggcgggctgcaggtcccgagccctgcccggtgggaaggcagctaaggcccggcgagaaatccagcgcagcgctggtgggcgggcactgctgggggacccagcacaccctccccagccgctggcccaggtgctaagcccctcattgcccggggccggcagggccagccggccgctccgagtgcggggcccaccaagcccacgcccacccggaactccagctggcccacaagcgccgcgcgcagcctcggttcccgctcgcgcctctccctccacacctccgtgcaagctgagggagccagctccggcctcggccagcccaggaaggggctcccacagtgcagcggtggcctgaagggctcctcaagtgccgccaaagtgggagcccaggcagaggaggcgccgagagtgagcgagggctgtgagggccgccagcatgctgtcacctctcagtatcacccctcagattctgcatcgattactgagagaaaggcacccttaggctggggagagcgggaagataccactttcaccaagaggctgctcagcatccccagagtggggcaaaccaacataatatgccccctgatatgatgcatggggtcaggggaggggatgctggggtgggcacagaatcccttcccttctaaatcgtcctgctgaaaatgcattgcctacacctaaccccagtgaaacatcagacaaacccgaattgaaagacattctgcaaaatgactgggctcctcataggacaaaaagcggctaggggactcttcttgattaaaagagactaacaggatgaggacgtggaatgccatgtgtgagcccattgggatctgggacaggaggacacagagctgtgacaggcattactgggacaactggggcttgtttttttttttttttttttttgagatggagtcttgctctgttccccaggctggagtgcagtggcgcgatctcagctcattgcaacctccacctcctgggttcaagcgattctcctgcctcagtctcctgagtagctgggactataggtgcctgccaccacgcccagctgactttttgtatttctagtagagacagggtttcaccatgttgagcctgatgggatccgggacacgcctatagtcccagttactcgggatgctgaggcaggaggatcgcttgaacttgggaggtggaggttgccgtgagctgagatcgccccactgcactcccgcctgggcaacagaataagactccatctcaaataaataaataaataaataaataaataaataagggccatggttgtggggtgaggaggggacagagaaggagagaggtttaggaggcagacttgatggtactttggacaggaggatacacagtcacagctcctggcctgggtgtctgggtagatggtgtgccctttgctgagagcaggtggctggggagcggatgggcccagcgctggctgtgctgtgtgggatttgcgagccctgaggaagaggttttgaggcttcagatgctcagggaagcaggggatggagatgtggcatcttcaactgaggagcaatgttcactcaggcactcagcagacgtttacttactgcccacaagtcaatcatggctgaatagatgaggcagcaatgagaacagcagcagcattacagcagtgacctgtttttttgatgttccaggccttgtgctaaataaatgtcttgcacagaatcactctgggctccccgatccctcactcctggtctgcctccttcctcacgggccactccacctcgctctcctttgctgaggccgcctcctctgcttcacttttaaatatctgatgccccacatcccagtcctgggccccttctgtcttctccctgcacacttagctgcttggctttcggtactgtctgggaaaaaccatgactccggagtccacatctctggccttgatttctcccctgaacctgccaatttatacaacccagccctctactgcgttaatcacacctcaggccccacactgcactcactgtttcactcatccccccccgcccttttttttttttttttttttttttttgagacagagtttcactcttgttgcccaggctggagtacaatggcgcagtctcggctcactgcaacctccacctcccaggttgaagccattctcctgcctcaggctcccaagtagctgggattacaggcatgcaccaccacgcccggctaattttgtatttttagtagagacggggtttctccatgttggtcaggctggtctcgaactcccgacctcaggtgatccgctgatccgcctgcctcggcttcccaaagtgctgggattacaggcgtgagtgaccgtgcccggcccactgctacaatactattaactaagctacagacgtgatgggattcaccagtttttctactaatatcctttttctgttccaggatccattccaggatcccacattgcctttagtccctctcctcatctcctccgtctcctccaatctgtgacaggtttcccatctcttccagtttcccctgaaggctgggggcacagcgatctgctcacctttgactttaaaaaaagtctccctggatgaacaatgacattggccccagagtgcccaggcttgggggctactgcaaccatccaggagagaaatagtggtggcttggagtaggaagtgggtgtagatgagagaaacaggtgaatatggaatgtatttattttatttttcgtagagatgggggctcactatgttgcccaggctggtctccaactcctgggctcaagcaatcctcctgcctcagcctcccgaaatgttggaattacaggtgtgagccactaccaggcatgaaacgtattttagaatgccatgggacatcagccaccagcaattttttttgttttttgttttctgagacagagtctcgctctgtcacccaggctggagtgcagtggccagatctcagctcactgcaacctccacctcccgggttcaagcaattctccagcctctgcctcccgagtagctgggattacaggcatgcactactgcatccggctaattttttttttttttttttgtatttttagtagagatggggtttcaccgtgttagcagggctggtatcgatctcctgaccttgtgatccgcccgcctcggcctcccaaagtgctgggattacaggcatcagccactgctcccggctgcatccagctaatttttgtatttttagtagagactggtttcaccatgttggccaggctggtctcgaactcctgacctcagatgatccacccgccttggcctcccaaagtgttagcattacaggcgtgagccaccgtgcctggcaaccttgcaaattttgaattccctgctaggtgctgggaactcagactttcaccaacaccagcccagagaggctggacgaggcagtggctgcaaagggagaggacaggggatcttaagaaggcgtgaagggaggggatctgcatgaaggcaactgtggctacttttttgtttcgttttttgttttaagacaatgtcttgctctgttgcccatgctggagggcaatggcacattcttggctcactgcaacctccacctcctgggctcaggcactcctccggcctcagcctcctaggtagctgggactacaggcacgtaccaccaggccctgctaagttttaaaaaacttgtagtagagacagggtctcgccatgttgcctaggctggtctggaactcctgagctcgagtgatcctcccaccttggcctctcaaagtgctgggattacaggtgtaagccaccacacccatagttgtggctcctttaagatgaggccatgataccctttactcttcacctaaagcagtagccaagggacatgtacataggggtgctcaacacctgcttggtgaccgagggattgagcggggtggagggtgacacaccaaggtcatggcaactctgtcatgaggctaggagttgcaaagagggtcactactgaggacagttacattaatcctttaggccagtgcttctgaaactataaggtgtacaaatcaccagacagttttgttaaatgcagatccagaagcagtgcatctgggctgggacctgagattctgcatttctggcaaactcccagctaccagtttataaaaggttgtccatccctgcacctttcctatcctcatggcagccctaggagaagcctcagggtaggaacatttggatacaaaaaaacaggggctttctagagctgtcgcacaggaaacaggctcattagaacctgtctctactaaaaacacaaaaatgagctgggcatagtggtgcatgcctgtaatcccaactacttgggaggctgaggcaggagaatcatttgaacccaggaggcttaggttgcggtgagccgagatcgcgtcattgcactctagcctgggtgacagaacgagactctgtctcaaaaaaaaaaaaaaaaaggtcgggcatggtggctcacgcctgtaatcccagcactttgggaggccgaggtgagcggatcacctgaggtcaggagttcgagaccagcctggccaacatggtgaaaccccgtctctactaaaaatacaaaaattagctgggcatggtggcgcatgcctgtaatcccagctactcgggaggctgaggcaggagaatggcttgaacctgggaggcggaggttgccatgagccgagatcacgccactgcactccagcctgggcgacagagcgagactctgactcaaaaacaaaacaaaacaagaaatggggggaattccttggattctgattgaaggaaatagaactgggaagggaagactgtcaggtggctgctgttgggcccacctctccctccctggggtcacacaggccattgtcaacacttctctccacaaatttgcttcttctctgtcttgtccgtggatccccagaccctgtggccttccagttcttgaacccatctcttgagtgagtcagggtctcaatttcaaattcttgacctcagcttgagagaggcatccaagcccttgtctaatcagccttggtcagagaggtggagtcacttggtacagacagtgagacctgtaggaggagggtgtggggtttgccctaatcactggtcctaagggacaaagaaaggtagaatatgagagctgcctggacctctccccttaccttgagcccctctcttctctctccagacaccggcggtgggggccggagcgcaggacagcactgggcaaggctccggggagaaagcgggttgtccctggagcggcaccggtcaacactgacccaggcttcctccatgacaccacacagtggacctcgaagcaccacgtctcaggcttctcctgcccaaagggacactgctcaggctgcctctacacgtgaaatccccagagcctcctctccccatcgaatcacccaaagggacacctccagggcctcatccacccaacaggaaatctccagggcctcatccacccaacaggaaacctccagggcctcatccacccaagaggacacccctagggcctcatccacccaagaggacacccccagggcctcatctacacagtggaacacccccagagcttcctctccctcacgaagcacccaactggataaccccagaacctcttctacccagcaggacaacccccaaacttcttttcctacttgtactccccagcgggaaaaccccaggacaccctgtgtccagcaggacgatcccagagcctcctctcccaacagaaccactcaacgagagaattccagaacatcctgtgcccagcgggacaatcccaaagcctccagaacctcctctcccaatagagccacacgagacaaccccagaacatcctgcgcccagcgggacaatcccagagcctcctctcccagtagagctacacgagacaaccccacaacatcctgtgcccagcgggacaatcccagagcctccagaacctcctctcccaatagagccacacgagacaaccccagaacatcctgtgcccagcgggacaatcccagagcctcctctcccagtagagctacacgagacaaccccacaacatcctgtgcccagcgggacaatcccagagcctccagaacctcctctcccaatagagccacacgagacaaccccagaacatcctgcgcccagcgggacaatcccagagcctcctctcccaatagagctgcacgagacaaccccacaacatcctgtgcccagcgggacaatcccagagcctccagaacctcctctcccaatagagccacacgagacaaccccagaacatcctgtgcccagcgggacaatcccagagcctcctctcccaatagagctacacgagacaaccccacaacatcctgtgcccagcgggacaatcccagagcctccagaacctcctctcccaatagagccacacgagataaccccagaacatcctgtgcccagcgggacaatcccagagcctcctctcccaacagaaccacccaacaagacagccccagaacatcctgtgcccgacgggacgatcccagagcctcctctcctaacagaaccatccaacaagagaaccccagaacatcctgtgccctacgggacaatcccagagcctcctctcccagcagaaccatccaacaagagaaccccagaacatcctgtgcccaacgggacgatcccagagcctcctctcctaacagaaccacccaacaagagaaccccagaacatcctgtgcccgacgggacaatcccagagcctcctctcgcaacagaaccatccagcgagacaaccccagaacatcctgtgcccagcgggacaatcccagagcctcctctcctaacagaaccatccaacaagagaacctcagaacatcctgtacccgacaggacaatcccaggacctcctctcccaatagagccacacgagacaaccccagaacatcctgtgcccagcgggacaatctcagagcctcctctcccatcagagccacccaacaggacaaccccagaacttgtattcaacagaacatccccagatcatcttctacccaacaagacaaccctaaaacctcttgtaccaaacgagataacctcagacccacttgtacacagcgggaccgcacacagtccttttcctttcaacgagacaaccctggaacctcctcatctcaatgctgcacccaaaaggagaatctgagaccatcatctccccaccgctccactcaatggaacaatcccaggaattcatctccccatcgtactaacaaagacatcccctgggcctcgtttcccctccggccaactcagagtgatggtccccgaacctcttccccatctcgctccaagcaaagcgaggttccctgggcatccatcgccctccggccaacccaaggtgacaggcctcagacatcctctcccagcaggccagcccagcatgacccaccccagtcctcctttggccccacccagtacaacttgccatcccgggccacctcttcctcccataacccaggccaccagagcacctcccgaacttcctcacctgtgtaccccgctgcctatggggctcccctgacctctcctgagccctcccagcctccatgtgctgtgtgcattgggcaccgggatgcccctcgagcctcttcgccccctcgctatttgcagcacgaccccttccccttcttcccagagccccgcgcccctgagagtgaaccgccccaccacgagcctccctatataccacctgctgtgtgcattggacaccgagatgccccccgggcgtcctcgcccccccgccacacccaatttgaccccttccccttcctcccagacacatcagatgccgagcatcagtgtcagtccccccaacacgagccccttcagctccctgcacctgtgtgtattgggtaccgagatgcaccccgggcctcctccccaccacgccaggccccagagccttccctcttattccaggacctccccagggccagcacagagagccttgtcccttccatggactctctgcacgagtgcccccacatccccacccctgtgtgcattgggcaccgggatgcaccctccttctcatccccaccacgccaggctcctgagccatccctcttcttccaggatccccctggaactagtatggagagcctggccccctccactgactctctgcatggctccccagtgctgatcccccaagtgtgcatcgggcaccgggatgcaccccgagcctcctccccaccccgccacccacccagtgacctagcgttcctggcaccctcaccttcaccgggcagctctgggggctcccggggctcagcgcctcccggggagaccaggcacaacttggagcgggaggagtacactgtgctggccgacctgcccccacccaggaggctggcccagagacagccagggccccaggcgcagtgcagcagcgggggccgcacccacagccctggccgtgcagaggtggagcgcctcttcgggcaagagcgcaggtgagcccgggggtggggtcagccaggtgggctggggaggaggctcggcagcaggacaggtgaagggttagggtgccaaaagaaagtgttcaaatccccctggcttgccatttaccggctgtgtgaccttgggcaaatcgctccatttctctgtttctgcatattgggagttttctgttttgtgtgtgtgtgtggttaagtgatgtcatgcacagcccagtggttaacagcaaagactgcagtcaggagggctgagtccaaatcctgggtcaaagccacatgtcaactcgtatgacctgatatagtgagttaacctacctgagcctcagtttcctcatctgtaagggaggggaacatgagcacattcattcaaataagggtgaactgtctttttattttttattttttgtttttttttttgaggtggagttttgctcttgttgcccaggccggagcgcaatggtgcaatctcggctcactgcaacctccacctcctgggttcaagcgattctcctgcctcagcctcccgagtagctgggattacaggcacgtgccaccacacccggctaatttttttgtatttttactagagacggggtttcgccatattggccaggctggtctcgaactcctgacctcaagtgatccacccgcctcggcctcgcaaagtgctaggattacaggagtgagccaccgtgcccggccaaaatgagagtgaactctcaaaccctttgatccagactcatgggttttttttttttttcttccgtgcatgagggagaagaagaaagtacccatgattttttcctgccttggcaaagaaaactcatgggtccctatgcatttcagaaaacagttatgtcaatttaaaatgtatggccagggccgggcacggtggctcatgcctgtaatcccagcacttggggaggccgaggcgggcggatcacaaggtcaggagatcgacagcagcctggctaacacggtgaaaccccatctctactaaaaatacaaaaaattagctgggcatggtggcgggcgcctgtagtcccagcaactcgggaggctgaggcaggagaattgcttgaacctgggaggcggagcttgcagtgagccgagatcgtaccactgcactccaacctgggtgacagagtgagactccatctaaaaataaaaataaaataaaaatgtatggccagagctacctattttaagaaagaaagctcacagaattatggatttttagcagtcaaacatcctgggacacctgaagtccaggtgtcttttgagtctccttggtcagcagcactggccccctggaaggggagcatttcctcctgatcaggctgaggtttctctccccagaagttccagccctcgagttttcaagaatcagagctagaattccattagttagggtcaagagaacaacagcaacaaaaagcagtctggaagtctcaaaactttccatgtatataattcaacgaatttttagtttatttaccaagttgtccaaccattgccacaatctaactttagaacattttcatcaccctaaagggtatggaatattttgtatctaaaattcctctttgctgctccttgggaaagttttctcctggatttgaatctgcatgagaaaccttatcagtcttggctgggtgcagtggctccctcctgtaatcccagcactggagcttgcagtgagccaagatcatgccactacactccagcctgggtgacagagtgagactccgtctcaaaaaaaaaaaaaaaaaaaaaaattagccgggcatagtggcacacgcctgtagtcccagctactcaggaggctgaggcagcagtattgcctgaatttgggaggtggagtttgcagtgagctgagattgcgtcattgcactccagcctgggcaacaagagtgaaactccatctcaaaaaaagaaaaaaaagaaactttatctcttgttcttcaaatttccttttccagtaagcttgatcatttaatatccagatgacaaccgtgtggtctccagcattagtataattctttctttggccttaaaaacaaaaacccagagcagttttaggtttacagcaaaattgagcagaaagtgcagtgttccatgcacagcctctcccactaccaatatcctgtactagataggtatgcttgtttccagctcctggcctcaagggatcctcctttcttggcctctcaaagtgctggtgagccactgtactgggcagtagggtgatacatttgttacaatccatgaacctacactatgaaatcacccaaagtttagggttcactcttggtgatgtacagcctataggcttgaatgaatgtatgacaagtatccaccattgtaacatcatggagtagtttcaccctgaaagtcttcagtgtctttaacttttttttttgtttggagatggagtctcgctctgtcacccaggctggagtgcagtagtgcaatcttggctcactgcaacctctgccttctgggttcaagcagttctcctgcctcagcctcccgaggagctgggactacaggagcatgccgccacatccggctaatttttttgtatttttagtagcgacagggtttcaccctgttgcccaggctagtcttgaactcctgagctcaggcaatctacccacctcggcctcccaaagtgctgggattataggcgtgagccaccgtgcctggtctgaccttttttttttttgaaacagggtcttgctttgtcacccagcagtagtgcagtggcgtgatcatggctcactgcggcctcaaactgccaggctcaagcgattctctcacctcagcctcctcagtagctgggactacaggcgtgtaccactatacccagctaatttttctactttttgtagagatggagtctcactttgttgcccaggttggtctcaaactcctggcctcaagcaatgctcccaccttggcctcccaaagtgtctttgacctttttatgattactatttcttgtctaatgtcaattttcctaactttgtcttaactaataactcagcagggacattaaggtctttaagccaaagttaattaattttctttccttttttccaggataatttcagagagataaggtgtttatattaataatagaaatgagaaatatgtttacacttttattaaccatttgtttttacacgatcactcctatacatttaattctactctctttgaaatagcttatttaccttttagggaagttttcataattttactgaataattaaaatttttcctcttatctggcaccttttccaagtagaaaaccattcatcctctgaatatggaaaattttaaaactgtgcagtgtgtgtgtaagggacagactggagcttatgagcgggtggctgtaggagtgtgcttttattttctcctatttcctcatcgatatgtatttattgagcatctactctgtccaagcattgtcccgagtctggaaaatttttcttaaagggttgtcacatcaaagcattgggagttttggcttgatcttaatttttttttccttagatgcctttggcatctcttagagtcacgtagcatcctgtggtcatttgaattcaaaacctagccttcactggatttgctagacttgatggctttgctcctttaattctctctggaggtcgaagaacccatctaagcttccgaaggaaacgtttcctttgtcatgcttggtgcggccacatcaaccctcgggaacaggtggccccgaggagacgctgttgcttcagcatcggacaagccaggtctctgttggggtttcagaatcttcttgagtccctcactcttttctctcagttctacatgggggaaaaaaggaaggcgagttctcaggaggaatgctcatcaagcaagctggagttcgtatggaaaatgcatccatccggaagagaacacacaagtgccttgcttccctgcaccgggtgtttccactattgtcctcctggtcctccccattagggaggaacagcccactgggtcacgtctgggctcttgcttcatcgaagctcctataccccagttcgggggaaaattcactctaaggccttcagctctcacagagtaaggaaacgcactcacctccaattagattacaaattggctgggtgcagtggctcatgcttgtaatgccaagactttgggaggtcaaggcaggtggattacctgaggtcaggagttcaaaatgagaccagcctggccaacatggtgaaaccccgtctctactaaaaatataaaaattagctgggcatggtggtggacacctgtaatcccagctgctcagcaggctgaggcaggaaaatcacttaaaaccagaaggcggaggttgcagtgagctgagattgcaccactgcactccagcctgggtgacagagcgagactccatctcaaaaaaaaaaaaaaaaaaaaagttacaaacagcctgcccagggagccctcaagctcagaaacacttcctccagggaactttggttcctctccgaaccagctgccaataactgctaacaactaacattattgtgctttatggctctgattctaatgacattggcaaaagacatgaaacaacaaaaaactccaaccccatactttttttttgagacaggatcttgctctttcacccaggctggaatgcagtggcatgatcatggctcactgcagcctcaacctcccaggctgaagcgatcctcccacctcagcttcccaagtagctgggactacagccacgtaccaccatgctcggctcattaaaaaaatttttttttcctagaacaaggtctcattctgttgccagggctgtctcaaactcctcgactcaagtgatcctctgacctcagcctccccaagtgctggaattacaggtgtaaagacactgtacctggcctcccaaccccatatatatatatatatattttttgagacagggtctcactatgtcacccaggctggagtgcagtggcgcgatctcagctcactgcaacctccacctcctggggtcaagcgatcctcctgcctcagcctcctgagtagctgggattacaggcacgtgccaccacgcctggctaagttttgtatttttagtagagattgggtttcactatgttgaccaggctggtctcgaactcctgacctcaagtgatccacccacctcagcctcccaaagtgctgtgattagaggcatgagccaccacacctgggctaatttttgtatttttagagactaggtttcactatgttgtctaggctggtcttgaactcctgagctcaagccatccgcctgcctcagcctcccaaagttctgggattacaggcgtgacccattgcgccctgcccaatcccatacttttgaaggtgtcgttccagcatggctcctcaggcacaggcccaccacagacagcagggcctatggaggcctgagcagagtttcctcatacttccctttttgctgcctcactctgggtccaccacagggtggcctttttcaggcttctcttcctggttcagttcatcgaccaaagacatggctccatttgctaactgagacccaaccaaaataaacattcatggagtggttgggccttttgttgtgaccccttaggtagaggaagggagagatatgcccaggttctgtttggtgtttctacctgtcaatagagataccacgttaatcattaacagccatgcctcccagttagtaagcaagacaactaactggaactagactttttacacaagttagagatgatcttcatcggatgcgtcaacaatgcctgaagcccagtgtcttagaaacaacacttgcccagggtcaggcgtggtggctcatgcctgtaatcccagctacttgggagattaaggcagagaatcacttgaacccgggagatggaagttgcagtgagccgagatcgcgccactgcactccagcctgggtgacagagcgagactccatctcaaaaaaaaaaaaaaaaaaaagacacttgcttggacagtttatgttggcctctctgaagttgtcagggagaatgtttctttcttctgatcttgctcagagctcttttgccaacagctaggatggcctggagttttcaaggctaagcgctgggattctgttggttaacagtgatgggagggaaaaaggaaaagaaatccaaaatttacaatatggacaggaaaaggcagaaagaatggaacacgggggcacacagcagtctggctctgtcgtcccacctcgtgggctgcgatcatgatacaagtgcttggcccctggaacataagaagcactcaataaatgctttgtcataatgattatgtgtgcccagtgcctggtacacagtaggtgctcaataaatcttaattcccgcaaagaccagtctaacctttgtctgggggtggctcttgggctgctggtggggtggtggttagtcataggaagtactggatgagacaggagagggccatggccagggccagatccccctccccacccaaccgcctctactccccacttttctcgtcatgttcgcaagagcctcatgaggcagaatagagcagtgttaaccatccccatttttcagaaggggaaactaaggccctgagagtcatcctcacttagggcccttcaacgagcttgcagtgggtccctggctgtcccacatctcctcctgttggaggtgggagcagaggggctggggtgctgggagtgggacagtccctcagaggagtggctgcatttgctcataggaagtccgaggcagcgggggccttccaggcccaggacgagggacggtcacagcagcccagccaaggccagagccaacttctccgaagacagtccagccctgcccccagcaggcaggtgagcactgccagctgtctggggccccgcaccccaaggggcggccactgcctcttccctcccgctagaagccaggcagggggcttggacaggaaggtcctctatgaaagggtcggagtccaatcatggggatccagctctcccctctccccaacggccagcagctcttggcaaaatgcacaagaccccacattaatcctttgaagatagcccctctcccacgctatccccttcctttactaagcactgctgtcttttttttttttttttttttttgagatggagtcttgcactgtctcccaggctggagtgcagtgggacaatattggctcactgcaacctctgcctcccaggttcaagtgattcttctacctcagcctcccaaatagctgggattacaggcgtgtgccaccacacccaactaattttcgtacttttagtagagacagggtttcaccatgttggccaggctggtcactcctgacgtcaagtgatccgcccaccttggcctcccaaggtgctgggattacaggcgtgaaccacggcacctggccaatactgctgtcttgagcagatttcagggaaagccttgaagcaagaatctggctctaagggccctctctttcagggtaatttgtatctttaaccaaacccagagggctaggcccgcctcagtggaatggggtattggtggtggaggttctggcacctgatagcccaagttggaatcagtatctttgagaggggtgagaagccaagaacgggggcaggtctttgcagatctttttctggaactgaggaaagcgggtgaaagggaggagctgaccccggaggggtggggcagagaccctgtgtactttttggcctgctttgattcaggctgctgtgtggacacagccttgactctctgggggcctaagaaaggcagagctggcagccaggtccccagagagagagcctcacctaccccctcacctcatccccaggtgaccatgctccctgccaaacaggcagaactgacccggcggagccaagcagagccccctcatccttggagtcctgagaagagacctgagggagatcggcagctccaggggtccccgctgccccccaggacatcagccaggacccctgagagggagctgcggacacagagacctctggagagtggccaagcaggcccaagacagcctctgggggtgtggcagagtcaggaggaaccgccagggtcccagggccctcatagacacctagaaaggagctggagcagccaggagggaggcctgggccctgggggctggtggggatgtggagagcccagcctgggggcagccaaagccccggagggagcatgggggggcacttccagggagtacaaggagagctgggggcagccagaggcctgggaggagaagcccactcatgagctccccagagaactaggaaagagaagcccactcacgagcccccctgagaactggggaggccccgcagagtcctcacaatcctggcactctgggacacccactgctgtgggctggggggcagagggagcgtgtccatacccgcgtggctctgagaggcgacccgagcttgactggagggatctgcttggccttctccgggcaccaggagagggggtctgggcccgtgtccccagcctggactgggagggcctcttggagctcctgcaggccaggctgccccgcaaggacccagctggacacagggatgacctggccagggctttagggccagagctgggtcccccaggcacaaacgatgtccctgagcaggagtcacacagccagccagaaggctgggccgaggccaccccagtcaatggacacagccccgcactgcagtcccagagcccggtccagctgcccagccctgcctgcacctccacccagtggccaaagatcaaagtgacaagaggaccagcgaccgcaactctggcaggcctggagcagacgggccccctggggagcaggagcactgcgaagggccccagcttgccagagctgcaggtaaggaggtttccaccctcccaagggtagccagaaagtcagccccactcagccaagtctccttggaaaagcctccccttggagtagcctaagctcctgcatccccctccaggctcagacctcagcctccctgctgaccacaacccatcccgatcaccaaactggcccaacaatgatgatgagcaacacagttttaagcgtttatgggccaagccctgatctgaatgtttgacgtgtgcttttcccatttagtctccttagcaaccaggtgagaaatacactatttacagataaggaaactgatgcgcagggtgaagccacttgctggtggggcatgggcaaaacccaggtctgctcagtgcagaccacactgaggcctcaagcaagatgctctggccagggcctattcccctcctggctccaccatacctggtttatgttgtgtctggtggcacacacctgaccccacctgggactgtagccagtgtgggcatgccccttcccctggtggtactcaggtacctgagtccaggacagcctcgcttaccctctctggcccctacagctcctctcagacacagagaagagggtgcatcaatgctcactgggttcagctagctgccaagacaggctgcttaaatgagggtcgtgtgcaaagtgggcccagcgccgggcacacagtaggtgctcgcccttcccctgcttcactggtgctttggtgctgccttgaagcccagaacattcttcatctgaagatggtgggcagggagggtcttggaggccagaatcctgcaccctggcaatagctcattgggaggacggcatgtggttttgaacaccagcctctctctctctctgtaagatggaccaaccacttctctgacgggcagcgctggggtgccgtgggggttcctgcttgtttctccaaagcctcctcatctcctagatgcaaagtccaacgccacctgccccaggatgagcagggcttccaggcatcagggtgcaccccgtgctgggcccagggccttgccatatgtgcctcaagtggataggaggcagctgccacttgacagatggggaaactgaggctcagactccttaggcatttgctgggggtcacacatgcataggtcgtgagaaatgagatcaaagcatccactccaaagtttgtgcttttatttttatttatttatttacttattgagacggagtttcgctcttgttgcccagactggagtgcaattgcacaatctcagctcactgcaacctccgccccccaggttcaagctattctcctgcctcagcctcccgagtagctgggattacaggcatgtgccaccatgcccggctaattttgtgtttttagtagagatggggtttctccatgttggtcaggctggtcttggactcctgacttcaggtgatgcatccaccttggcctcccaaagtgccgggattacaggtgcgagccaccatgcccggcctaagtctgtgcttttagccaccacgtcacaaagctcctgagcccatgggaggactggagaaccctctcccctgtatttccctgtggctttgatgagttgaccctccaatcaactcaatgcgtggacatcagagaagcagggataagtcagctcgtcctgccctcagattgctgtcaggcttgttaggaaggcacacagacagctcaaggaggacacggtgctgtgtcccggggcatgctgggtgccacaggccggccaggtcaagaaggaagttagaaagattcttcagtttcatggtgaagctcagggttctcaggaggctaggagatggtggctgggaagggatgggagcaccatgtactgaaaggaatttcacagatgacaaaacgagtaaccaccaggtcctgctggggctccagctgctcctctctatgaaaatccttggcttggcacagctgggtgcagtggctcacatctgtaatcccagcactttgggaggctgaggcaggcaaatcacgagctcaggagatcgacaccagcctggctaacacggtggaaccccgtctctactaaaaatacaaaaaattagccgggcgtggtggcgggtgcctgtagtcccagctacttgggaggctaagacaggagaatggtgtgaacccgggaggtggaagttgcagtgagccgagatcacgccactgcactccagcctgggtgacagagcgagactccatctcaaaaaaaaaaaaaaaaaaaatccttggcatggcactcaaggccggcttcccttccttccactccggatttgcctcattggtgctgagctggctgcagggcctgtgagcacatatccctgcctttgcacatgctcttccctgttcagccaccaaacgcctgttcattgtcgaagtcttaggtcaggctccctgtcctgagaagccttccctgaacagtcactcctagtaatggtccccttctgggcttggcagttttgcttccatttgtccatgcaacatccatctaatagggttgtcatttccccataagctccacacaggcaggatctctacctgctttatctctgtaactctagctctggcccagggcctgacataaaggaggggacagctcagtggatgcatgcaagatggaggacacaggggtcagtgggtgaacaatgaatgaatggagggtgaatgtgtgaatggatgatggatcaatgatgcatgttgaatgaataatagacatcttttggatggatgacagatgggtgatgatggatggatagctgggtgatgaatatatggtggtggtggatatatgatggatgttgcttaggtgatggatggatgaactttgggtggaatatgaatggatagatgtggcatgggtggatgaatgtcagatgatagatgttggagatatgggtagatggatgatggatggagagagggatatgtaggtattgggtaaatggatatgtgatggatcaatggagggtagatacatgaatgggtgatagacaatggatgatgggtacatgagagggtgagtcatgtgatagacactggatggttggatggatacatggatctactgatgctggacgttagatgggtgttgcatggacagatgatagaatggatggatgaggtggacagatgcatgcatcctggagaataagttgggctaagctgtgttctttttttaatctccagttccaaccagaggagcctgaggagtcagaaccaagcagaggccaagaccccctgactgaccagaagcaggcagactcggtagctgggtcatgggtgtgggtacatacggtggggaagggagggggaagcaggttggagatgggcttcattcctcagaagagccctagaatcaaccagaccaaagttggcattgccatggggtcatctatgtgcatggtggggccttaagaagaggggctctgcaggagccaccttctggcttggggacctgggtaggtgggcgatcctggggtcagaaccctaggccatgcttctcatttgctgggactgaaaaggtcaatgtctttccctgcgcaaatgatggtttggccccagtggtctctgtgggaagagatccttccggtttgaaagggccaggccaggctgaaagagcagggcttccacgagcaggagccagagagctgaggatgtacccagtcagccaggcctggagggtctccagggtcctggaggcgggagagatatgtgcgggggtgggacccacggatgctgctctgaggcctggctgcagctggtgagcacaactctgcccgcccctccccgtgacctaccaaacagactgttctcgtcaccctcagcctccagagaggtgagatcagagttgagggccgtggggcagtgggaggtgggggaggaggagacagactgtttggggctgtgttttccggtcctgctcttcctcccgttgcctcctgaagccaggggtggcagggagcgtccattgggcagcatagcgccccccaagtagggccctgccgtgagtcaaagctgggggaattctgcccaaaccctcactgtgcagatgaggaaatggaggcaggggagtcgtcccaggttatacagtcagtggctagctggactgggactagaacccagggcccaggaaccacccagcgctctctctgcacctccacctggcacccatgctgcccccgtccctgccccgatttcttgcgtggcttcgaacggcagtgctgtaacttcgagcagtccagtcttcccatctgtggaatgggcggggacaggggacactggtcgctaaaggcgctgccagccctcccagggactctgacaactttgctcttcctctttctgggttatttcttcatatcctggagccagagtagtgaacgaggcggaaacagcaatgccggggtgcccctctagtctccatgaaacgggcccggcccatcaacgtggaaaatatctcaacctacccccacccctaggcagccttgactggtcagaactgataaccacctcattcatgcattctttcacacacacttagtgagcaccttctgtatacccaggtgtgggtcacaggtgagtcggagcgccatcaaagagttcagtctagtgagatggttgcatgcctgtggtcaggactgtgatggggaatgtggtagcagggtcgggggcacccctacccccaaagccctcctggacctgtgctttgatgcttcaagttccacttccaaagagtctgcagattccagagcgaggaccctgggctctctcctaccttcccagtaacccatgtgtggctttggacaagtgcctctgcttcacaggggccttggtttccccaacgaggatgactccaaagagggagcatttgggggctctgctaggaatgtgtgtagaagtccacaactcattccctttgcttaagctggggtcacaaacctaacgccctgaaggccaggcaggtaacaatggtgagaaggtgggggggcaccgagggcacttgtgtgactcctcggttccagatagctgttgccatggggaagacgggcccagagtttccacatctttcgatatttcaagaaacactggagatatgtatttatatgtgaaatctctaacctaatgtgaaatactctgaaaacactatgtgggcagaaacatacctgtggtctgcaccccctccagctggcgcccgtggtttgactttagggtgatgacgtgcacaccttcaaaggtgctgagccctgggagccttgtcagtccaacacgatgtagtgtgaacaagttaaccagctcgtctcggcagttctgggaggagagaaagatgggaaccctggggctccatggtggggggcaccacagaatgggcaggggaggctgtagccaggggtgcccccatcctgccaaagggacctggggccaacactggaccctgtttgacaggcagacaagaggccagcagagggcaaggctgggagcccgctcaagggccgactggtgacctcatggcggatgcccggggaccggcccacgctgttcaatccgttcctgctgtctctgggggtcctcaggtggcgaagggtaggctggctccagtggggactggaggggtgagggtggatagagacggggatgggagggaggagggggctgttaagcaaaggagagagagtgggggctgaggaggaggcacctagggccgtcgcatgacaggagaggtgggagcagagctcttaagctcatcctggtctcagcaagcgagtgggtttcccacttccggggcaggcttgggggctgctttcagcttttggagtgaggggtgatggaataatctacacagctgaaagcttccaatcagcagcctctcgccagccctgggccaacggggagccaggtatgggggaagggaaggcgagcttataagtggctctgggattgcaaagtgtgtctcagacctgggcctgagccagtttcacaaacatctggcgttacgtaacccatcccctgcccagagaggcctggaaacactcaagcctctggctgggttttccacaagggcaggcagctgagacccgctccctcccacccgcttcacagcaggacagaaggggcctggccatctccagcagccacaggctggctcatggggtctcttctctctttgagaggctgactctcttactcaccgctgttggctctgagtccagcactaggctgggcacctcagagacagtgtgcccattttacagatgaagggactgaggcccagggaggtgagctgacttgcctgaggtcgcacagcttggggtataaaggagctgattttcctcattctcagatgagagaagggttgtagccaaacttactgagcctcggttgccacatctgtctattaggaaaaagtctgtggagactcagggctgcagagagggctcagggagatcaggatgcatggaggttgcggggctgttgtcgaaacactaactttcccatccacttcagaatttcctttttttaaaaaattaagacggagtctcgctctatcgcccaggctggagtgcagtggcaccatctctactcactgcaacctctgcctcccgggtccaagtgattctcctgcctcagcctccagagtagctggaattataggcgtgcgccactgcacccggctaattttttgtatttttagtacagacagggtttcaccatgttggccaggctggtcttgaactcccgacctcaggtaatccgcccaccttgacctccaaagtgctaggattattggtgtgagccaccacgccaggcgtttttttttttttttttttaaattaagatagagtctcgttctacccccagactggagtgcagtggcaccatctcggctcactgcaacctctgcctcccaggttcaagcgattctgccatctcagcctcccgagtatgtggtactacaggcgtgtgccaccacacctggctaatttttatatttttagtagagatggggtttcaccacgttggccaggctggtttccaactcctgacttcaagtgatccgcccgccctggcctcccaaagtgctgggattacaggcgtgagtcacccagctgagcccagaatttcctttcgctgctctttgtggttaaggcaccgagggtgagcaggcaagcatggttatctgagtagtgtggtacctttaagccatgggcaggaattaccttgtctaactaaaggtcaccaacacacagcacgtctggcaggagggggcaggtaagtccttggtagagcgaaggaggagcgaagcagggaaagcactctggggtaatgatgctggctaaccagcacttattgtatgcctactacatgcccagctctgtgttcactgcatggcgccacctaattgcatttgatccacactcccaggtgcagttagacgcctactgtccattttacagatgatgaagtgaagctcagagagggagggtcacttgctccaggtcacacagggagcaaggggcagaactgagattcagaccctgctctggctgacctcagagcccagtgcttccaacacgccccctacaccactgccttcacatcctgatctctctgagccctcctgcagctctgggagtccccacagattttccccattagaaagatgcggcaaccgaggcttggtgaggttggctacagtggttctctcatgtgggagtgagggaaatgaagagctagggatggaactgccagcagggcctcccagttacacagagcagatttaaacttctcttgggctgaagcagtgaaattagcccaaggccaagagccagaaagcctggagtcgagttctggcttggcacctaacttgtgtgcccttctctgagccttaccttattattctcagtagagtaacggtttgagactggataacctcgaagtttggtagctctggtctttgccagtttaataactcacccctgggtccctgaggctgtgctgtctctgacctgccaggatgagttgtggtttcttcattggtgcattcattcattcgagccgtgcttacggaggatgtgctgtgggcttaggccctaggctggtttccaagatgtagacaaaaaacattccagccctggccactggagcccagttaggtaaggacactgacatgtaactgatgagaacagtgtggtcaccactttagtggggaaaggtacagatgtagggagcactgggccagcagttcctaagtctgctggggacactttggcttcctttggtctgagacttcaaggaagaaattttccaggccaacaagcattgggagggggaaggggagaaagagagagagaatgtgtgtgtgtgtgtgtgtgtgtgtgtgtgtgtgtgtgtgtgtgctgggtgtgtgtgagtgtgtgctgggtgtgtgtgtgtgtgtgtgctggggtacagaagacaggaagagaagtgttccaggcacagcagagaaccatcagggggtagaaggacctgtcttatcctgggaattcctagtagtccagtgctgtgtatctttttttttttttttttttctgagatggagtctcgctctgttgcctaggctggagtggaatgcagtggtgtgatcttcactcaccgcaacctacgcctcccaggttccagcgattctcctgcctcagcctcccaagtagctgggatcacagccatgtgccaccacgcccggctaattttttgtatttttaccagagacggggtttcaccatgttggccagcctagtctcgaactcctgacctcaggtgatccacccgcctcggcctcctaaagtgctgagattacaggcataaaccaccgcgcccagcctccagtgctgtgcatctctttatttacttattgtattttgcaaaattgaccaaagtatgtgtctctccagcctgtcaaatgagaatctggaaggccaggatgacaggcaggagccaggttgtgatggttcctgactgcctagaagaggaatgtagcactgatctgtcagcattggtgatgtgtggaagaactttgagcagggaagtggtctggtcactgtgttgcgggtactaggaggagtcgcaggggccagaaaagcctggaggaggctggtgctgttaggtgcccagggcactggaccaggaccctggtggtaggtgaggtctcctgcgtgttcattcactctcccaaggactgactgcctgagtgaggtgcaagggtagggtgagaaaactcagcccggggtgccagaaggccagtttctagagttagatggacttaaccttggcctcattcctcatggtggagagactcctggcagcaaatgctgggaaagaacttcagctccctgggcctccatttctttatctgcaaaatgggaacagtaattataaaagcaataatttttttttttgagagggagtctcgctccgtctcccaaggtggagtgcagtggcacaatctctgctcactgtaacctctgcctcccgggttcaagcgattctcctgcctcagccttttacatagctggattacaggcgcctgacaccacgcccggctaatttttgtatttttagtagagacggggtttcaccatgttggccagtctgctcttgaactcctgatctcaatgatccacccacctcagcctcccaaagtgttgggattacagacctgaaccaccgcgcccggcaagggcaataatttttgaaccccaaatcaagatgacagaataattgaaatgccaattattccaagcttccctgcctccttgcctaaggatagctaatgagggataaagaggttgtcctaggtgccttacttgaattaacacttaatccttccagcaacctcatgaggtaacagcattaccccattttacagagagtgaaattgagcaccgagaggtgccttgcttaaggtaacactaggctggaatccccgtgccacacgaacttcctagtgcatttagcaaccaattccaccacggtccctactcacctgcaggaaaagagcatctaacaaacggcccagcgttctgggaacctgagcaacgggtgcacgcccacacctgaaaaaccccaaaccaaaaaagacccatttgtgaggagtgggcatttgggagagaccctgccatccaagaactcactttgtgtccagcttactcgctaggaattccgcctcttcctgtgtgacctcgggcaaatcggctcacccctctgagcctccgttttctcattagcaaaataagacctccctcccaagtctgtggtgaggacgaaaatcgactcttggcgagtgggacccgctgagtcgttagtactgggtgctttgccccggtccccgccaaatcacggcgccgagccctagcggacccatcgctccggggccgggtcgggaagcgcagcctgggcgagtcgtgcccacgcccggccgcccgcatcctccgcccccgcgccattgccggagtcacctgcaccctgggcccttccttcctcccagcgcgcccgcggcccgggcccgcccgccctccggccgccaccgccctcccttccctgcggccccatccgcccaccccgccgtcccgccgtcccgccgccccgccgccctagcgcgcccgtcccgttgcggcaggtcccgcccccggcccgtctcgcgcttccattggcccgccgcggcccccgccgctgtttgtctcggcttccccgccacccattggcccgctcgggtcctcccaggaagtttgaaaaaaaaaaaaaaaaagttttatgggcggatggaaggggccggggcagcgtcggggaaaggaagggccggaggcgcggcggcgggcggccgagaggggcggcggcggcggcggcggcggggttcccgcgccgcggagcccggcccgagagccgcgtccacgttcctgcctcctgctcccgccgccctggggcgccgccatgacggtgagtgccccagtcagccgcccgcgcccgaggccgggagaagggcgacgacccgaggcagagcccagcctctcccctccggggcagccccctcctcatttcccgaaggcgagaggagggctgggccggaagacggggccacctccgaagcgctttcggccagaccggcctcacccttcccgcaggctcctcctcgccttccctcgcccactcgcccccgggagcccaggcgaccctgaggggacggaacgacccgtctcgggcgccccctcctcacacttgcggcaccagtcacgggtggattcggggcgaccctttcccacctcccctccagccccctagacgaagacccgattccccaaggcggccaggggccccagggaggagcggaggtgggcctgggctggggaggggcgctcgtgggtgcggatgggtcgcgctgacccgggcctgggcaagccagccctccgtgtggccgctggcccgaggtcgggtgggcgagaagtggccggaccgccccacccacagcccgggaggcagtcccgggacgtctgaagcagcgggataccacgtcttcctgggcttgcactttgcagcggtcctggggccttgggacaagcctgcgagtctgagtagggggcatgatggcaggggtttgcctttctcatgggggtgagctgtacccaagccccatcaattacctgtgccatagttagcatattgagcctcacagctgggttcgctggactccccacttcacagccagataaactgaggcttggggaggggcgctggtgagttgcccgaggtcaccccaagtataagagaaggagtagctcctttccctgtccttctggcccactgaccgtgatgttcgggaagggaggggtggggctgcttttggtttctggctagtgcttcagggaggctctgacagcccagtggccctcctgggggaggatgagcagggtgtgtgtgtgcacaggcggcagtaggcctctttcaggggagtggagaccctgcggaggagtgggtgggctgctgggggcgggctgggctgctggggggcgtggcacgcctagcccctgccctgtgagtgtgatggcctggacttcctcggcgtcctcctggacatcctgccacctccctgctggcccttcctgtcgtcagcagcctccccttttctgtcaggagcagaagggatgtggggggaggagctgagtcagtgtcctggggccaggaggagagaagttgccttgcccaccgggtgcctgcccggccctcagccgggtgctttcacgttaccagatttgatccttgaaggttggtagtaacatcttaatcaaacagatgaggaaaccaaggtgtggcgaggtgaagtgtcatgccccaggtaactcagtgagtcccaggctaagccagaatttgtatccaggtccgttccagctttctttcacagttgcctgtcctgggggcagcacgtgctgagcaagggtaaggctgccggaagcagcgtgtggggtgcttggaagatggacagcacatccctgctggtggcagcagccttcctgagggaggtgtcctcctgtgattatagggccttgtcaggtggagatggactagcgaggagacagcagtgtggacagaaacgggtggtcatgtttgagaagtagcaagagcgtagggaaggggtctggggaggagggcctcactgctagggcttggacaggggcaatagagagccatgaaagcttttagagcagagaggaggctatgatcaccattaatagtgttcattgagttcatcctggctgccatgcagacctcagcctgctctcagctggtgctcctcctgtacccacctcacaccctcctcccctggcccccgtgccctgaatcagggatccatacagagcaagtggcacaggtgtgtgagtgtgtgaggctccggggcttcagggagttgggattctcttccaccccttttgcctttgcctgggtgcagctttgctcccggatcagccttccccctcgcctgctgggcatcaaattatatttggtcccttgtttactgtctctttcctacagtccaccagggcaggggccacagctcttggtcacagctaatttcctggcctagaacagtgcctgataactttaaaaaaaaatttttttttctgcaaacactccctgagcccctatctgtgctgggtcctggcaggtaaacagtgtatgtccctgactgtgagttgcatctaatctagcctgtgaaggataagtaaagggcctcaagatagtcacggatgcaacagaggcctctgagaggggccatgggagggcaggacgggggcggctggtggtgcggtgagtggcatgaactgtgaagggacctcagaggtggccattaagctgggtcttaaggcctgagtagccgcttgcctagtcatcggaggaggaggaagcatagtgtttcaggccaaggacatggcacatatgaagggcccggagtcctggtgtgttgtgatcggcaaggaatatgcagtggtataaacaggggcccctcagcaaggggaggccaggctggaagagtgtgatgaggcttccctgccatcctgaggcagctggactttgttttaaagccacctggagaccgggtgtagtggcttatgtgtgcctgtaatcccagcattttgggaggctgaggtggatggatcacttgaggtcaggagttcgagaccagcctggccagcatggtgaaatcccatctctactaaaaataaaaaaatttgctggacatggtggtgggtgcttgtaatctcaggtatttgggaggctgaggcaggagaaacgcttcaacccgggaggtggaggttgcagtaagccgagatggcgccattgcactccagcctgggcagcagagactctgtctcaaaaataaagcaagccacctggagccgtccctggaactgttaagcaagcctgggataccaagcctttttgagtgagtcccgccagcccgagggtgtgtagaggggttgtgtgcctggccaggtaggaggcggggctgtgagaacctgccagtactcccgaaaggcggaaggagaaactgagcttctagcaggtgaagaagaggtagctgggcctgaagagccctgtatgaaggggcatcgtgggagatttagatgatcggaccttttgaccctggggacaggtttccctgccagtttaaaaactcacattggttggccgggcacattggctcacacctataatcccagcatttttggaggccgaggtgagcggatcacttgagctcaggagtttgaaaccaacctgggaaacatagggagaccccatctctacaaaaaaaaaaaaaaaaaaaaaattagctgagcatggtggagtgcttatgtcgtcccggctacttggaagctgaggtggaaggatcgcttgagcccaggaggttgagtcagcagtaagctgtgatcacaccaccacactccagtctgggcagcagagcagggccctgtctcaacaaaacaaaactcaaattggtgaccttctatccccaaggtcactgtgtcatggcgtgcctgacatggtatgtgatgtgtctgtactgggctctggaggatcactaggtttctccttgtacagacacgttcagtcctgtcggaagctgcgggaggggaggaccgccccgtcatttgccacatcaggcagccaggactcagagaggggatgtgacttaggaaggtcacagtgactccacttcccaggcagccctagaggttccagcctgacagcttgtcattcctgccccaatctcccagccctggcccagggactttcgcctgggactgcccagtggtgccagctctgtgggcccaggaagcctggctcctccgggctaggtgggggtaggggagatggcccaaaaagcacagaaatttagaccagggggtagatatttcctcagcaagtttttcctgagccttgctgtggtcaagccccctgcaaggccctggggccacaggaggtcccagactgaggggaagtggagccaggtgtggtcaccaatcttcattcttagcttgggatcgccctgggcagcctccgtctcaggtggaagacggggtgggcagaatacagagcagcgggacaaacgcagccccaggggttctcggccgtgagcagagcctgtgtctctcccttagacaggtatacagggaggggctgggatgccaacctactgggtcccccgactgtggctgtggaaggttctggatcttcagctgtcccaagccccggttggtccacttcctatacctgagaaggggctccgtgggtggagagtgggtcgggagaggtggccaggcagggtggctgtggtttccagctgccactgtcaccgcccactccactgagccatgccacccgttctctgcaggcaaccagacaccttggcctggtgaggcctcgatgtaggggctgataggtaggctcagagccatggcaaccggtggccacctcctccctgccggcgccaggagcggagactgcagagggaccgggacttagatgagagaggtctccccagcaggaagggagggtctggtggttggcacccactagatgagcatggtcagaaaaatatcaggatgagcaacttctttatctaggcctgggtgggggtgcctggcacaggtctccatgggacatgctgcagctggtagcccccagaccccggggctgtgcccccctgggcggcacccagaaggtagggcttgccaggactgacccttcccaaagagatctaggcggggaccagagggtttctgaccccagcctgtgactggctccacctcccatagtctcctggagccgaggaaaggacaggactggcgggcccatgggagggtccgtggggcacttggtcctcgtcagagggaggaactggacagttcgcgcagtgctgctggtctggactgccctctgagctctcagggggtctctatgcaggcagagtcctcccagcccctctctcccattcttgggcgaggggtcggctggagagaggcccctgggacatctgggtgtgtgtgccagccacccagcccaacttcttggctctctgagtgccactatcaggaaaggggccagggctgcctcagtggctgggaggcctgcttggacttgggggttacctagggccttagccctcttggctggcttcccaggagctcggtcccacaggacttggggacagggtgggtgcagcacgctcccctcaccagcccccattggcttcctgctggacccaactcacctccctcctcatctccccacagcccgatctgctcaacttcaagaagggatggatgtcgatcttggacgagcctggagaggtaagaggactgaggccggaggggaggaagctggcttgtgctgctgctgggcccctgggcagcccaggagtgggggtggggctggggctggtgtgagaaccctgggggtggggctgggaggggtggaggctgcccattaggcttctgcctcctggagcagtctgcagtgtgtaaaagggatcacagcaaggggccgtctagcccctcacacccagtgccccatcccttgatctcatcaagagtctcttggccctgccacctcagtaggagcctgggtgggagtcaagggtcttgggtggaagggctcgtagaagctgtctggcccgagacacagattcctaaagcctggtctgaggggggtggggctcagggcgcaggtgctggggtttcacccacctggatccccactggttgagtcaaagcctcctctagtcctcagtggccacgtctgtgacatgggcataatggataatggtgattctttctagagtggataacaaggtcagagagatcaagcacgtacaggtgccacaaagctcctggcacttactgtgggctcagctaaagacccttcccttcctctggcatatgtgtccttggaaccagcagggacagtggctgtttcctcagctctgttctttcggctgccaggctggctccctgcccacactgcctgggcaggagcgtctccccacccctgccctgcatgcgcctgctgctctggtctgcgtgcagcctgcatgccggagagggctttgagccagaggggatttcattgtgtttccggcccacatgttttattccctccagcccacagccttccctacccgctgcctgcccgctgtccctggtggctgctctctaggctcacacaaagcccggcaccccgccagtgaccccttcctggcctccccacccagggtccccggagggcagagggattacaggccccacccagagctggccattagtcatcctctatcacagggttctggaatgtccgaactggaagggccctgggaattcagccagcccaaccccttggtgcacagacaggagacgggcccatgagggtgttggtctcttccaggcctaggagcacctggggcagacccaggctcagaactcagcgcacctgaggcccatggagctccacccagcttccatctcagacagtcataggctaggcctggaagagctaaagaaacctcttggcatagaacccctgtcctactttacagagaggcaattgaggtctgcagcagcaactccgtttacttagtgagaggaaaatgcttctaagaggcctggcctcccagaacaaacccagcaacctggttggtgtccatccctatgccaagggccatgacagccatccacacaagagaggatgggcgccgctcgcctcaccagaaggtctaggcacttctttttttgttttttatttttgtttttttttttctgaggcagagtttcactcttgttgcccaggctggagtgcagtggcgcaacctcggctcactgtgtcttccgcctcccgggttcaagcgattctcctgcctcagcctcccgagtagccgggattacaggcatgcgccaccatgcccatctaatttttttttgtatttttagtagagacagggtttctccatgttggtcaggctggtctcgaactcctgacctcagatgatccacccttctcagcctcccaaagtgctgggattataggcgcgagctaccgcgcccagctatagggacttcttagtagccctactttatggttcagaagactgaagctcagaaaagtggagacacttgcctaaaggcacacagagagaaagggaactcttggatacaaaactccttttctcagggaggcaatgtggaaagaagcagaaggtatcgtcgttgcatgccccttgagaacttaccatcttcttgaggagagaaaactaagtacttgaaacaaccaacagcacagacagggcttggtgatgtgagggaaccctgggagggctggggaccgggtgatatgcactgaccctggcagtgggcgggccgcgactggcattccagtggagtgaccagaagcccagaggtgggctgggcttggcatactatcaggctgttctggcgcccccacccctttcctacatgtcctgccaatctaaccccagctggagcagagacaggcactgcaggaaggcacccaatcacaaatcctaaacttacagcttagggcgctctcacctgctgcggatgtgggtagccagcctacagttcaagaagcagaccgtgcatctgggcgcggtggctcacgcctgtaatcccagcactttgggaggccaaggcaggtgaatcacctgaggccaggagtttgagaccagcctggctgacatgatgaaaccctatctctactaaaaatacaagaaattagctgagcatgatggcgggcgcctgtaatcccagctactcgggaggctaagacaggagaatcacttgaactcaggaggagggggaggttgcagtgagtggagattgcaccattgcactccagcctgggcaacaagagcaaaactcctccatctcaaaaaaaaaaaaaaaaaaaggcagcagattgtggctggcactcactcctactccagggctccatccagtcctacttcccaggggaccattgtccctgaccatggtgatgatctgggggaatatggaaaaagacgtaacgtcctggccccgctgagtccctgacttgcttacacaggtcatcacccctccctgtctgcactgggtccggggtgcctgaggagccttggcaatcttaaaaggagctccaagaaggaaagggagggtgtggttacggaggggaaaccaatccatttcacagatgctacccctgaggctcagagaggaaatggaggggccaggtctcaaattggcattttccgcctccccacccctcctgtgtgcagcatagtgagtttggcagccacacaggacacctgtacaatcacacacactggctctttcattccatcctccttgcagcctccctccccctcgctcaccaccacctctacttcgcagtggaagaaacattggtttgtgctgacagattcaagtctcaaatattacagagactccactgctgaggaggtgaggccatgggtgtactgatgaacccccggaagggcctggggtggcctggctgggttcactggggtgggtcacaccagggcccacacggaccatagtgggccctcttgctccaggcagatgagctggatggtgagatcgacctgcgttcctgcacggatgtcactgagtacgcggtgcagcgcaactatggcttccagatccacgtgaggctgtgtgcagcttgggggctggtggtgggcagcatggctggaggtccctgggggaggttttggtgttgaacatggctcaccatggagactggatcccttcactcatttacccagaggccctatcttcagagccagagctgtgatgccaacacttagcatatctgggggagacgctggagccagcagggctcttcccaggccaatggaagggaggttttgtaccccctgcccaccccagactcaagaccttagatgcatcctgggaaggaagggccaccctccctggggtccatagtggggagggagtcatgcggctggccatgtggcaacctacccatgcggtggccttgcagaccaaggatgctgtctataccttgtcggccatgacctcaggcatccggcggaactggatcgaggctctgagaaagaccgtacgtccaacttcagccccagatgtcaccaagtacgtactaagctggactggggccttgagggaggcacttacccttgcgtccccgagtgggtttctaggtactcacctgagggctgcacctttctgggccctcgtttctctgtcaacaacatgggaagagagtagtgagcattctcggtatcatccagaagtacactgagggtttgaggtttgatctgtcttctcaaatgtgatggggcctcttctctttggaggagatgcctgtgagtcaaaagcccctgccaggtggctgttctgtctctgtgtctgtgccgtgggggccgtgtctaagcctgtgttaggaaggggtggttaggtagttcagccttggcgcccacacctcccgggatggggagctcactccttctggaggctgccacgggcactggggcaggagggctgagttaccgagtggcagagccccccacagtttatacccagatgcccatggcgggctgggacttggagctgctgggcagcgggaacagagtgtggtattaaagggggctgggctgggtgtagtggctcacacctgtaatcccagcgatttgggaggctgagatgggaggatcacttgagctcaggagttcaagaccagcctgggcaatatagtgagacctcgtccctacaaaaaatttaaaaatcagctggccgtggtagggtgcgcctgtcagctgaggtgggaggatcacctgagcccggaggccgagtcccccagactggccacaccgcggctattcagccttaggccagaggctttcctgtctaggtttcagagtccccatctgtcacgttagcatgtcatgtctgtacatgtgccaggatgtgcccagagcactttgtgaactctgaagcactgtgcagttggactgttatttagcatctaggcccagctgctttaagaaagaaaccccgggcacagtaacttcatcgagatagatgttcatgtctcccttcagaacagccccgaggtatgcagtcctggcctggtggggctcgctctgccgtttcaggggagccacctgccacacccactcggcagcctatagtcacatggctacaagtagctgtgggaatactgcgagtgtagtttttggcagggtgaccacgtacccagctatgactgtggataaagagaattgccatagttgttcagagtctctgcaacttgtgttctgtgcaccccgaggtcccgccttcaccccatcagcagtgactgggcatcccccttgccactgtgagcctcgggaacctgggacattggtctcctacatcacctcattgatcaccatttgcaaaaagccccctgcctgctttccacgttcgcccaccctgtcctcacatccatcctgtgagaggcgtcgctgtcccacattacagatgaggtcactgaagctcaaagagggcaaagagaccagtgtggtggttcacgcctgtaatcccagagctttgggaggctgaggtgggaggagcacgtgagcccaggagttcgagaccaacctgggcaatatattgagaccccatctctatcaaaaatttaaaaaattagctgggcgtggtggtgcatgtctgtagtcccagctactccagaggccgaggcaggaggatcacttgagctaaggagtttaaggctgcagtgaactatgatcacaccactctacttcagcctgggcagcagagtgagaccctgtcccttgaaaaacaaaaacaagaacgggggcgagggaagccgggcatcctggtgggtccctgggctgtcaagaggtggagctgggatgttcctggggtctgttaaccaggaagctcaggtcgggctgcttccttccctggggtctgtctccagcccctggcacagggcctggcacacaggtgtcgctccaaaagtgctcattgtgggactgcaggggtgaggacccacctgacgtggctctgctggtgccctaggctctcggactctaacaaggagaacgcgctgcacagctacagcacccagaagggccccctgaaggcaggggagcagcgggcgggctctgaggtcatcagccggggtggccctcggaaggcggacgggcagcgtcaggccttggactacgtggagctctcgccgctgacccaggcttccccgcagcgggcccgcaccccagcccgcactcctgaccgcctggccaagcaggaggagctggagcgggacctggcccagcgctccgaggagcggcgcaagtggtttgaggccacagacagcaggaccccagaggtgcctgctggtgaggggccgcgccggggcctgggtgcccccctgactgaggaccagcaaaaccggcttagtgaggagatcgagaagaagtggcaggagctggagaagctgcccctgcgggagaataagcgggtgcccctcactgccctgctcaaccaaagccgcggagagcgccgagggcccccaagtgacggccacgaggcactggagaaggaggtaggcaccacggctggctctctaggaggccccttgccccagcgcccctccagtccctgcattcatgccctggcatttgtcttgcactcctacagtgatggggagctcacccctgatctgctgtgagtgtgcaccccacactcctgcgaactagaatcttcttccttagaccttagtagtttggtttggttttgttttgttttttcctagttctgcccttagcagccatagagaagagaagtgggaagagaagggagagacctgccaggctcacacctgtaatcctaacattttgggaggccaaggtgggagggtcccttgaagccaagagtttgagaccagtctgtgcgacatggcaaaaccccatgtctacaaaaaaatacaaaatttagctgggcgtgctggtgcatacctggagccccagctacttgagaggctgaggtgggaggatggctggagcccgggaggcagaggatgcagtgagccaagatcaagccactgcactccagcagtctggcaatagagcccgactttgtctcagattaaaaaaaaaaaagaagaagaagaagggcgagaccgtttattgttcatcttctgcccgtggcctccctgcctgcactgactcgtggaatcctcacagcggcctctacccctagggtggacttcagcagttttactgacgggaaaactgaggctcaaagatgtttcctctgtcacctccatgatgtgtaaacatctgtgaccacagtttccttttcctatccctgtctagccttctctgggccaaggctctcccaggtcattgacctggccatccaggaaacagcccagcgtgtcccctggctacatctcactccagggctgcttgcccttctcaaaccctgaggcattcctaagccttccagggacgctgggcttgtatccgtgtggagctggaagcctgcgggctcctcactgccttccaccagccctgccccagcttccaggtcccactgaccacccttctccctcgtaggttcaggctcttcgggcccagctggaggcgtggcgtctccaaggggaggctcctcagagtgcactgagatcccaggaggatggccacatccccccgggctacatctcacaggtaaggccggggggctgtttttcagggggagggggcagatttctgcttgccgtgttatcaggaaacagctgagattttgggagcccttcctgtgtgtgctggaacctgtgtggggcatttgacatgcgtcatctcatttactctccccacagctggtgggcgtgatcactgtgcccgttttacagacaaggccactgagctctgagaggttatgtgacttgcccaaggtcaccccgcctgcaggtctcaaaggtgggatttgagcgagggtccggctgactgcagagcctgtgtgtgagtccccgtgtgacactctgcacttggacccttgccccggggaagtggggggctagtggccccgagagtcactccctgaacacagggaaatcctgccgaggcccactgggccaaggccccacacaaggaggtctgcaggacaggggagcctccagtagccctcagagaatgcaccgtccgcctaggacagcggttctcaacggggtccattttgtcccccttggggacatttggctgtgtctgggaatacttctggttgtcacaactaggacaaactaactctctagaaaaaacgtgtgtgtgtacacatatataagtttattataaattttaccaataaaaacaatgcttagtacacaatttacaaataaaaatatataattttattgtgaattccgtacagcaaatggatttttctcagaatgctttcagtgattttttccatactcttgtatccacaactgattaacaaagggggttgttctaacgtgtgctggttgacatttttgtttatggtaatgagtaagatgagaagacatttgtcgaaactttactggtccatgttgtcagctacttctttgctagatcggatagtagttttctattgagaatatttgagaatattctattaagaatatttttgcaattttttgttctatttacaatgtaatggttatagatgtgagatacttctaagtttaatctgcattattagcattttcttatcacttgcttaagtctagacaatcaacaaaacaataaatcaagccctgatgtgtaatgtttaccaattctgcagtgtaaatactcccgctgtggccaatgctgcattaccagcacaaagtccctggacagagagttgggaagagatgtcacactattcactaggatttccaccatgcggatacagtagatgtgattggccccaagagcacgcataatacaacacagtgaaatatttaggaagtaataaatttgagtatctattgccttgtctttaacatagttaatttaaagtatataaatttaattgttaatggctgtgcttaacaactacatcacagaattactaaaaatttgacaatcagctgtctgtagttatcacaccattatctaaagtagaaaagaaggggccaggcgcagtggctcacgcctgtaatcccagcactttggggaggccgaagtgggcagatcacgaggtcaggagaacgagactaacctggccaacatggtgaaactccgtctctaataaaatacaaaaaatagccgggcgtggtggtgcgcactgtagtcccagctacttgggaggctgaggcaggggacccactggaacccaggaggcgcaggttgcagtgagccgagattgcgccacggcactccagcctggcgacagagtaagactccatctcaaaaaaaaaaaaaaagaaagaaaagaaaagaaggctgagatctaggccctaggcaggaggagccttctaaaaatttccaaggggaggtcacgtcatgagggggctctcaggaaggcattggctggggcatgagaaggaaggctggttggtgcgtattgtggatgcctccagtgctgagctaatagttagaagctctggcctggtacggtggctaatgcctgtatctcagcactttgggaggtgaggtgggtggatcacttgaggtcaaatgttcgaggccagtgtggccagagtggtgaaaccctgtctctactaaaaaaaaaaaatacaaaacttagcagggcatggtggtgggcgcctataatcccagctactccagtggctgaggcaggagaatcgcttgaacccgggaggcagaggttgcagtgagctgagatcctgccactgcagcctgggtgacagtgagactctatctaaaaacagcaacaaaaaacaaaacaaacaaaaaaagagaagctcattccacagacttttggaggtttggggtcagacagtgacatcaggaaagtgatgttggagtggagggggcttgggagagggccaggtgtaaggcattaggaaatggctgaaggagggtgaatgtcaagggtctggagggaggagaatttgggactggatgaccagatctacggaaggcagaggggcctttgggggccctgaggctggggctgctgctccagggaagcccggagaccgtcctggggccaagtagtggatggagtttccactgatagaggagcaggcaggggaattggggtgggacgcagagggtgaggctgggggcttaccttgtcctggggaggggcaggggaggagccagtgttgtgccctgtagcctcccaccctgaggcagagaagggagctgggggcccaacaccccagctgaggcaggtgggagggcctccgaggcccccagccagggggcttctgcctgcgtgctctgctctaagaagctgcaggggctgctttctgggtgggtggggctgggacccattcgtacccacctataatcagagtggcttcatcttcctccattttattttattttaatttttttagagatgaggtcttttactgtcacccaggctacagtgcagtggcacagaggctcactgcagcctcgaactctagggctcaagcagtcttcccacctcagcctcctgagtaggaaccacaggctacaccaccatgcctggctaattaaaaaaatttttttgtagagacaaggtctcactatgttccctgggctggtcttgaactcctgggctcaagtgcttctctcatgttggcctcccaaagtgctgggggtacaagtgtgaccactgcactggcccacctttgtccgttttactcatagagccagctttagatttcctttagataaaggctctgccactacaatgacgtttaaaaggcactgctttggcttctcagcttactggtggcaaaactgaggcccacagaagggtgtgacctttgagctataggcagacctgtgtctggagttcaggcggtctggtccccaggtgccccattgggtgcaccaaagtctgtcagtgtttggtcccgttagggtgggatgggcacggggagcaggtgggaggggagaagggaataactggggagcagagctgaagaccaggcaggtggaggagtgaccccagatgcggaaggcagcagagaagaagagctgagtcatctgtatcgccctcaggcacgggaggaggcggatggaaattcggtggacctggaggagtgacagctgggagggattccccagctggtatctcgggctgagtgggtgcccttccttcaggggttgggggcttgctgctgcacgacagctgtcgggtggtctggggcttcacccactggacatctggtaaagagaacctttccccactattgcagtggggacagaggcatttctttatctactttgatgtccatgtcaaaggtggcagccaggatcaggacaccttgggccactcaggaaggtaggtgagagaggccctaggagcccctgttcgtcagctgagtcccacctcctgatgtcagcccctgcacccctgagctgctgggtctgcctgcctggtctggccctcttcagaagagcagtgcccacccccacattgctgggctccccactggtggatgctggcgtaccgtctccctctgtgcacagggttcccgtgcccagggagcctcgggggctggtcctgtgaggcctgctttacggatgccaagactgaagctcagagggggcgaggggtttgttcaggttcactccaaggcgcagccagggtgaagaccgcctctgaggtccaaagtcatgttctgttgtcctaagccaggagacacatagagggcaggaacagaagccaggggacagacacccctgtcgccacatgaagctcttggccctcgctcctccatcaaatcgtccccaggtgtggctgctggagaggcggggaggtggcctttgcgtgggggagacagtccctcatctggtcctctgtgccttagtttcttccctggctcttcttccccttccctttttaatgaccttaaacatttttttaattatataaaagaaatgtttacattttcaaaaataatttaaacaaattgaaaggctggaaatcaacaccctcacactccttctgctgccagctgccaccccagggtcctgtcggtggctgctgccgcctgcctatcagtttctggtggcagctgtaacctgtaaccacagctacctaaataatgcacatgtattacctcacgcttctgtaggcgagaagtctaacgcgagtcttgccgcgctgcagccaaggcgtgggcaggactgtgttcctctgcaggcacccgttgtatcccttgcctgctccagcttctggtggccgtccgcgtcccttggctctcggccccttccttcatcttcaaagcctgcagaggggaagtcgagtccttctcctgccacgtcactctgaccatcccttcctggtcacacctcccttgaactcttcgcttctgcccccttcgtccacttttaaggacccttgtgattacactgggcttgagggataatctgggataatctcccgattttaaggtcagctgattagcaaccttgattccctctgcagcctgaattcctctttgccatgtaacatgatgtagtcacagatcctgggagtaagatgtggacaactttgaggggctatcattctgccccctacaatatcctccctaccttttctgtgttttctgtgttttccattcactgggacggacaggtctgcacgtttgttcccgtgagtgagatcataccacgtgtatgtcagaagccaactttcaccacctcattttgggatctttttccacagcatccacacaaaaactctgtctagcagctgcctgtgtcccattgtcaagctcgatcccatcatttattcaagagttcccctgatagggatttagattgtttccagttttcatctgttaccaacctggctgtagggaatacccttgttccaaaagtctctgtacacatacgactttctgtgggatcatttctgggagtgaacctactaggtcaaccagtggggtcgcaaaatgtgatgatgccaccggaccacccccaacacacaccgttgtggcggacactcccagcagtgggtattattagtctgagatacttgcccatcttgtctactaagcattattttgtattacatcatcagtttcagctcatttactgagcacctgccacatgtcaggccctggcctagaccctggggactgcgccagtcagatgttctcagtcttcagggaatttatggtttggcagaggtagaaccttttgaggcaggggagaggctgcccagagacagagctaggagagacatttaaactgggctgcaggtcagtaaattacccagggaggtaaagttgccaaaaaaacattccaggccgggcacagtggctcatgcctgtaatcccagcattttgggaggccaaggccggcagatcacaaggtcagaagttcaagaccatcctggctaacacagtgaaaccccatctctactaaaaatacaaaaattagctgggcgtggtggtgggcacctgtagtcccagctactcacgaggctgaggcagaagaatcacttgaacccagaggtggaggttgcagtgagctgagattgctccactgcactccagcctgggtgacagaacaaaactctgtctcaaaaacaaaaacaaaaacaaaaaaaccacaaaattccaggcagtgggaatagctaaagctcagaggtgtgaacgtgctgcaaccgtaactgtgagattgcttggcagagaaaggccagggatgagaacgtaaaggtcagccatgggaacggggacttgactctgtaggacgaggaatccctggagggcttgaggcaggagcgacaaggtgaggtttgtgaatgaggagccgtggggtgggggtgggagcaggagcaggtgcagactggaggtgctgggacccaggaggaggtggtgtacctgcccctgagccttctcctctggaggctggggaagggccgctgtccagaggaacggggcagcctgtgacaccctggcgtccggcccacaggaggcatgtgagcgcagcctggcagagatggagtcctcgcaccagcaggtgatggaggagctgcagcggcaccacgagcgggagctgcagcgcctgcagcaggagaaggagtggctcctggctgaggagacggcagccacggcctcaggtatggaccctggggggggcacagtgggctgggctctgagcctctgtgctgaggttcctcctagccaaactggggaggattttatcaaataagatgtaggggtctcagtgccacatttggggtaaagggtcagcaggtgttagaagctccaagaactggcctgtagccctacttaaaaagggaaactgaggcagtaaaagataccctccccacccccaacaccaccactaccataggtggtgactcttcctgctcaggggcctgcagccaccatagagtctgcctaaaggcacatgctacccacgtgcgtgggggagaggctgatcagctgcatcccctgtcctcataggagtgcctcctccctgggcacatgggccagaccctggggagagcaggggaaggtgtgagcattgtccatgccagctgtgtgccaggcactgggccccacatgtttcccacaggagcacccttcatcctggacaattccctcccctcctgccaccgcacacctgctgtgtgcctggcacattcctaggcatcactaggggtttgcagaacaatagaaatgctggccaatgtcacatgatctgaagctcacaacctgccagtgctgtgccaagtgctcatgcactcgaacccagccttggggccagtgtgctctgcatttcaggaagatcgcctttgcagccgcgtgtgttagagaccccttccccctcagcagagtctggacttcgccctgtaatctggcactaaggtttctgctgtgaaatggataaaaatcacacttaagtggaataataaagaccataaatagcctcatgtccgttcagggtggggattgccaccaaaagatttaccagaggcccggtgcagtggctcatgcctgtaatcccagcactttgggaggctgaggcgggcagatcacctgaggtcaggagttcgagactagcctggccaacatggtgaaaccccatctctactaaaaatacaaaaattagctgggcgtgatggtgggcagctgcaatcccagctactcaggaggctaaggcaggagaatctcttgaacccaggagacagaggctgcagtgagctgagattgcaccactgcactccagcctggatgacagagtaagactccatcaaaaaaaaaaaaggccaggcactgtggctcatgcctgtaatcccagcactttgggaggccgaggcaggtgcatcacgaggtcaggagttcaagaccagcctggccaagatggtgaaaccctgtctctactatgaatacaaaaattagccatgcgcggtggcaggcgcgtgtaatcccagctactcaggaggctgaggcaggagaatcgcttgaaagtgggcggcaaaggttgtagtgaaccaagattgtgccactgcactccagcctgggtgacagagtgagactccgtctcctgggtgacagagtgagactccgtctcctgggtgacagagtgagactctgtctcaaaaaaaaaaagaaagaaaaaaaggagagaaactttcaatgttcagaagtttcggattttagaattgtgggtaaaaccatgggtggccctgagtgggaaaaaaaaagcctcggtctcagtccttaggagctcacaatctgagaataaagccagcaggagctaatgttggggcatttactctgagccatgctttgttctaaattcttcacacaccttccaataaccccatggaggaaaggtactgttgttatcgatccctgttttccagataagggatctgaggcacaaggggttaagtcacctgtgcaaagtcacatcggtttatgctgactgtggagcctgagctcttgaccacgaggctggtcaaagcagataggccttgtttgagagccctcagagtctgcagggggggtgtactaggtggggtcctacctggaaatcactagaacaggaggtaccaatggtcagaccctgagctgtctccccagtagggtccatccaacaggattatcttcccttaatagatgggctgagagaggttgagagcttaccccaagccactcagtttatgacacaacctgggctactctagactcctggttcggtgctctttgcatagcactccttggtccaagtccatagtacttgcatagtactatgtggagtccacatagtactccaccagtacatgtggcgtctcagagctggtggcacttggtgctgctgacccccctccagtctctcttgtgcctctctgccctgcttccagccattgaagccatgaagaaggcctaccaggaagagctgagccgagagctgagcaaaacacggagtctccagcagggcccggatggcctccggaagcagcaccagtaagatgatgccggggcccaactgcccaccctgatggttatgggttgaggaactttgctgaggccccttggcagcggacacatcagtttgcccctagctgagattcctgctccagtctcatggatgcaagaaacagaagcagaaggtcctcaggcagaccccatgccagtcctcacagacagtccttcaggcagcttcttgtcttggctggtcccagcctccacccacctcttcacccctttagtctcccctggagctgggctgcagtgtcactgttgaccactaggcctctccctgccccagagcacagttttggaatgttgaggtttcaggggctttaactttaaagatgggcccctccagccgggcacattggctcatgcctgtaatcccagcactttgggaggctgggatcaggagttcgagactagcctggccaacatggtgaaaccccatctctactaaaaatacaagctagctgaatgtggtggcgggagcctgcaattctagctacttgggaggctgaggcaggagaatcgcttgaacccaggaggcagaggttgcagtgagccaagattgtgccattgtattccagcctgggcaacaagagtgagagcaagactccatctaaaaaaaaaaaaaaagatgggctcctccaagccaccctcacttagggtaaacacctgtagcccagagaagctgtcactggttcacagccccacagcaggctaaaggcaaacctagagagggaaccccagagtcctgggatgctttaagtctacctgactggactccaggcttggcaggagcaagacaacctatgctctcctctgctcctcctctggggcaggtcagatgtggaggcactgaagcgagagctgcaggtgctatcggagcagtactcgcagaagtgcctggagattggggcactcatgcggcaggctgaggagcgcgagcacacgctgcgccgctgccagcaggagggccaggagctgctgcgccacaaccaggtgggcctggccccaggttggggggacacgggtgggtcccggcacccctcccctgaccaccgtgcctctcccaggagctgcatggccgcctgtcagaggagatagaccagctgcgcggcttcattgcctcgcagggcatgggcaatggctgcgggcgcagcaacgagcggagttcctgcgagctagaggtgagtgtcctcactagcaccaggcagcccagtggttctcggggcccggggctatggggcacccccgccataggctgggtatcacctgtggcaggaaagccaagtctcccagtggctgggccagcctgactaggctagaacacctactgtgcatccagtagccagcattctgccctcccacctgcattgtgtcacctacctgccgtgtaccatagcaaatcactccacttttctgagtcccagtagctcatctgtaaaatggcaccagcaccttccttactgggaaatattggggtaagaaaatatgtgtgtatgtgtgtgatgccagtatcactgtagtattttctttctttttctttctttctttttttgagacagagtctctctctgtcacccaggctggagtgtagtgacacgatctcagttcactgcaacctctgcctccctggttcaagcgattctcctgcctcagcctcccaagtagctaggattacaggcctgcaccaccacacccagctaattttttatatttttggtagagacaagtttcactatgttggccaggctggtctcgaactccggacctcaagtgatctgcctaccttggcctcacaaagtgctgggattacagcatgagccaccacacccggccttagtatttatttctttactttttttttttttttgagacagagttttgctgttgttgcccaggctacagtgcagtggcgcgatctcggctcaccacaacctccgcctcccaggttaaaacgattctcctggccgggcgcggtggctcacgcctgtaatcccagcactttgggaggccgaggcgggcagatcacgaggtaggagatcaagaccatcctggctaacacagtgaaaccccgtctctactaaaaatacaaaaaaattacccgggcgtggtggcgggcgcggtggcgggtgcctgtagtcccagccactccggaggctgaggcaggagaatggcatgaacctgggaggcggagcgtgcagtgagccgagatcgtgccactgcactccagcctgggtgacagagcgagactccgtctcaaaaaaaaaaaaaatattaaaaaaaaaaagcgattatcctgcctcagcctcccaagtagctaggattacaggcatgtgccacctcgcctggataattttgtatttttagtagagacagggtttttccatgttggtcaggctcttctcgaactcccaacctcaggtgatccgcccacttcggcctctcaaagtgttgggattacaggcgtgagccaccgtgcccagccgatattttatttctctttttttttttgagacggagtcactctgtcacccaggctggagtgcagtggcaccatctcggctcactgcaagctccgcctctcgggttcatgccattctcctgcctcagcctcccgagtagctgggactacaggcacccgccaccacacctggctaattttttgtatttttagtagagacggggtttcaccatgttagccgggatggtcccaatctcctgacctcgtgatccgcccgcctctgcctcccaaagtgctgggattacaggcgtgagccaccgctcctggccccaatattttatttcttcaacaaacacttaggtgaggctcactctgtacctagaaattctggaagccctttttgtctgttaactcatctaatcttcctgacagctccatacattagctactatgactgtccccatttacagatgaggaaactgaggcacaggaaggtcaagtaccttaccaaagcttttatagctggactgggatttgaaccaggcagtctggctccagtctgagcttttaagcctccccagtcctggctgaacttgtttcctccttggtcaagtcagcagcacctagccctcggggttggggaggggttaatgaggtgccttgtggagtggttcagcctgctcaggtttatgtagggcttcttttcatccatctcactcccgaggtgagagcctggtgctgcatgagggctgcagcagacttgaccgtgagatatccactcacacgggctggacaggggtgagagtaagggaaggcaaagcaggggaatcggagagggcttcctggaggagtccgcctccaggatgtagagggtttttgtgcagataggggctgcattctaggggcctgaggcagagagaacccgggctgcagggcactatgggccagggtagctctggcttctggccctgggtcagtccagcacctatatccccaggtgctgcttcgcgtaaaagaaaacgaactccagtacctaaagaaggaggtgcagtgcctccgggacgagctccagatgatgcagaaggtaggtccttccgctgggctgggggccgtcggggactctggagccatctggatgccatcctgtgagcacctgctctgtgccaagccctccactcgcttcatccttcctcaggctctcctgtgcttctcccatgtaggtgtcatcatccccattcactgacagggaaactgagactaagaaaggggaagtgacttccccaaggctgtacttggcttctgtttatttagcattatttaatttattgattattattgagcacctactatatcctgggcactgtgctaggtgctgggaagacagatgtgaacaaaataaccccaaatctctgctgtggggagcttgcactccagtgagaataaccacgttgctaggagttgggtgggtcagggttcagcccaggtctgagtctgcagcccgcctggcccacccttggctgctatgtcactgcctggtgcgctctgtcagtttggggcaggaagtggacatgttggtggctctgtaagtgcacgtgagccagaccgtgtttaccgcacttgaagaacaggtggcgtgaactcacaggaagggcccgagcacccagccaggctgacctggttctcatcccagccactcactgccctgcggtcttggtcaaaatcttctcccccgaaacaggatgaggatgacaatgacgcctgtgtccctgggtggtaccagggaggtgggaggggtaagcccagaacccacggccatcttggggagccacctggagggatgaagcgaggtatctgcggggaggtctggctgctggtgctgcccatgtgcccggttggcagggctggagggagagacttcatgccctcatacctgcctcctgccccccaggacaagcgcttcacctcgggaaagtaccaggacgtctatgtggagctgagccacatcaagacacggtctgagcgggagatcgagcagctgaaggagcacctgcgtcttgccatggccgccctccaggagaaggagtcgatgcgcaacagcctggctgagtagaggtggatgccgaggcgtgtgccctgcagggtgggcaggggctgaggctctcccacacccgggactccctggaccaccccagccaggccacttccttcttctggcctccaattcccgttctgtaaaaaggacaatgaaaccagcaacacggggttgttgcagagatcccatcagacccgggccacaggctgcttcatcagcttaagcctgttcctccagagctgggcggcacagtgcagagccacagcctactcagtgcaccccccttcttggggctggaggcaaatgcagcgtgcacatccctgacccccacagtgaatctccactgagcttcacacacacacatcgcacgctgaggccgggcttctatcccagttagtcttaacactccttcttgacttagcagggctcaaagtggttggttggttggttggttggttggttggttggttggttggttggttttggttgctttgagaaaggtcttactctgacacccaggctggagtgcagtggtgcaatcacggctcactgcagcctcaacctcctaggctcaagggatcctcccacctcagccttctgagtagctgggaccacaggccctcaccaccatgcccagataatttttgcactttttgtataggtggggtttcgccgtgatttcccaggctggtctcgaactcctgggctcaagcaatacacctgcctcagcctcccaaaattctgagattacaggtgtgagccgctgcacctggccaaagtgttcttatttttgctttttcaacgccacatctacctggagcatcctctttctgataagtcctcatggacttcctatggcatgcaggagaggccaccctatggctgagctgcttgggaaggagccaggaagagcggatctggctgtaccttaggggctgagaggtggtggaaggacccactcagcacccttgcttggccttggggtggcctcgcagcccctcagcccaggcctcagccctgccgcaccttgtctttcaggtcccgcccagctgcagaccctccaggctggaggaccagccgccctccttccctcctggatggaagtaaaaagccaagctttctccccaccctctgtgggccacacgtgcacttgcacccaccacacacacacacacacacacacacacacacacagacacacagacacatacgcacacacgtgcacacatgtacacacggatacacacacacacacacacactgcatatctgagcgcgcccctcgcactgggtctcaccttgcaccttcttcaggattttatatgtgaagagatttttatatagatttttttcctttttttccaaaacactttatactttaaaaaaaaaaaaaaaaagcaattcctggtggctgtgtgcctccaaccctggtccccctctgtctccagccaccctctgcttgggcttctgagctggtggccctggcccagaggtctggcggaggcccaggcagcagccatggcggggtgtctctacaggggagaggcgggagcctgccaccctcttcctgccctacctcctactaacacttcctgccccatttggacccgtaccatggggctcaggacagagggagctagcagctggcctccatggccccacagcctccttcgaggctgtgctgggtgcagaaccgccagagccacccaaaaggtgtttctcttctgctccctgaacctcttaacttaataaaacgttccagcagctctggtgtcctagatggctggcagaacaggaatggagattggggtttcttgaagtggcttccccactcacaccctacccacaccccacccttcctaaagcagcggcctctaggcttctgagggtggggctgaaaatccaaggtctcccttagtacagactgtgacgcccccagtgtggcttgcaggctagtggcagcggaagcatgtgggaaatagcaagtccagtcccaccccaacctactgaaccagcgtctgcattttaacagggtgccccagtgattcacgtgaccttcaaagtctgaggagccctggagtagggcccagggcccaggcctgagagagaggcctggggctaagactagccctgaccatgaccttgggcaagtcacacccctcactgagcctcagtttgcttctccatcaaatgggtgtttttctttcagtcccagtcctctcctgaggcttttcccagaggtcatgcccagccctgggcaggggtgagggcagggttgtggctgccaggcacaggtccagcgggctgggagtcctcaccatggctggctgtgctgattatggttgcatggggctgggaagaggtcccatttctgagccacagaaacaggccacatccagtaggggtcctggaaggctgtgagaacccagaggagaccctgacccagcctgcaggtagaagactgcctttggaggcagctttgaaagatgactcttccagatggaagaatcaggaagggccttcccacgtggaggcaccagcaggagcaaacgtccctggtgtgttcaggcaaagagccacaggagagtgacctcgtggagtgggaagagattgtttcccattcccttgccagggattggttgaggaatggacaaggcttgcagttcacgcaagccagtgaaatgcgaggggaagtcttgggagtggggtggaggaggtcatctgggaagggtgtccttggtcttaaaaagaggcacaagaggccgggcgcggtggctcttgcctattatcctagcactttgggaggccaaggcagggggatcacttgaggtcaggagttcgagaccagcctggccaacatggtgaaaccccgtctctactaaaaatacaaaaaattagccagacgtggtgccaagcacctgtaatcccagctactcaggaggctgaggcaggagaatcacttgaacccaggaggcagaagttgcagtgagccaagatcgcgccactgcactccagcctgtgtgacaagggcgaaactccatctcaaaaaaaaagggggagggtggcgcaaggagaggacacctctctcctggccctgtcgccatcttccctcatcaatagctaaaaatggcaaagaagaaagagccaggaccccgtgccatcaaatcctccggccttgtgctgccctgtctcggcactgcttgccttaggagatcaggagtgttcctagccactgggagatgggatgcctgccactggcagctctgccgtccatcctcaccatcccaccgtccccccaagacagctctccatcccatcctctgcctcccttctagcctcaacctaactcagggctcccccgtctcacacctgggttgcaggaacatcctcttcaccaacccccctcccatccctcctcagggctgcctagggcagctacaaaaaccaggccagcctctgaaaggtgctccacatctcattaaaaaccgtgaaatcgcactgccccactatcagaatagctcagaggagaaggtctgccagtaccaagtgctggtggggatacggagaagagcagctcccaggcgctgctggtgcaaatgtgctttgttgcacccacggcaggaaactgaccagcttctcatcaagttaaatacgcatctaccctatggcctagcatttccactcttgcttacacatccaggagaaatgagtccttacatgcacaaaaggatgagtaccgtaatactcacatcagcaaataaacaatacagctgtgtgtcagtagtagaatgaataaattgtggtcgattcata

SEQ ID NO: 34 - protein, 1810 aa, Homo sapiens
MALSLWPLLLLLLLLLLLSFAVTLAPTGPHSLDPGLSFLKSLLSTLDQAPQGSLSRSRFFTFLANISSSFEPGRMGEGPVGEPPPLQPPALRLHDFLVTLRGSPDWEPMLGLLGDMLALLGQEQTPRDFLVHQAGVLGGLVEVLLGALVPGGPPTPTRPPCTRDGPSDCVLAADWLPSLLLLLEGTRWQALVQVQPSVDPTNATGLDGREAAPHFLQGLLGLLTPTGELGSKEALWGGLLRTVGAPLYAAFQEGLLRVTHSLQDEVFSILGQPEPDTNGQCQGVFFLTLSLLGNLQQLLLWGVRHNLSWDVQALGFLSGSPPPPPALLHCLSTGVPLPRASQPSAHISPRQRRAITVEALCENHLGPAPPYSISNFSIHLLCQHTKPATPQPHPSTTAICQTAVWYAVSWAPGAQGWLQACHDQFPDEFLDAICSNLSFSALSGSNRRLVKRLCAGLLPPPTSCPEGLPPVPLTPDIFWGCFLENETLWAERLCGEASLQAVPPSNQAWVQHVCQGPTPDVTASPPCHIGPCGERCPDGGSFLVMVCANDTMYEVLVPFWPWLAGQCRISRGGNDTCFLEGLLGPLLPSLPPLGPSPLCLTPGPFLLGMLSQLPRCQSSVPALAHPTRLHYLLRLLTFLLGPGAGGAEAQGMLGRALLLSSLPDNCSFWDAFRPEGRRSVLRTIGEYLEQDEEQPTPSGFEPTVNPSSGISKMELLACFSPVLWDLLQREKSVWALQILVQAYLHMPPENLQQLVLSAEREAAQGFLTLMLQGKLQGKLQVPPSEEQALGRLTALLLQRYPRLTSQLFIDLSPLIPFLAVSDLMRFPPSLLANDSVQQGYRGSEENSLEEDKGLRPMTPRSLAAIRDYSPGMRPEQKEALAKRLLAPELFGEVPAWPQELLWAVLPLLPHLPLENFLQLSPHQIQALEDSWPAAGLGPGHARHVLRSLVNQSVQDGEEQVRRLGPLACFLSPEELQSLVPLSDPTGPVERGLLECAANGTLSPEGRVAYELLGVLRSSGGAVLSPRELRVWAPLFSQLGLRFLQELSEPQLRAMLPVLQGTSVTPAQAVLLLGRLLPRHDLSLEELCSLHLLLPGLSPQTLQAIPRRVLVGACSCLAPELSRLSACQTAALLQTFRVKDGVKNMGTTGAGPAVCIPGQQPIPTTWPDCLLPLLPLKLLQLDSLALLANRRRYWELPWSEQQAQFLWKKMQVPTNLTLRNLQALGTLAGGMSCEFLQQINSMVDFLEVVHMIYQLPTRVRGSLRACIWAELQRRMAMPEPEWTTVGPELNGLDSKLLLDLPIQLMDRLSNESIMLVVELVQRAPEQLLALTPLHQAALAERALQNLAPKETPVSGEVLETLGPLVGFLGTESTRQIPLQILLSHLSQLQGFCLGETFATELGWLLLQESVLGKPELWSQDEVEQAGRLVFTLSTEAISLIPREALGPETLERLLEKQQSWEQSRVGQLCREPQLAAKKAALVAGVVRPAAEDLPEPVPNCADVRGTFPAAWSATQIAEMELSDFEDCLTLFAGDPGLGPEELRAAMGKAKQLWGPPRGFRPEQILQLGRLLIGLGDRELQELILVDWGVLSTLGQIDGWSTTQLRIVVSSFLRQSGRHVSHLDFVHLTALGYTLCGLRPEELQHISSWEFSQAALFLGTLHLQCSEEQLEVLAHLLVLPGGFGPISNWGPEIFTEIGTIAAGIPDLALSALLRGQIQGVTPLAISVIPPPKFAVVFSPIQLSSLTSAQAVAVTPEQMAFLSPEQRRAVAWAQHEGKESPEQQGRSTAWGLQDWSRPSWSLVLTISFLGHLL

SEQ ID NO: 35 - DNA, 5433 bp, Homo sapiens
atggctctcagcctctggcccctgctgctgctgctgctgctgctgctgctgctgtcctttgcagtgactctggcccctactgggcctcattccctggaccctggtctctccttcctgaagtcattgctctccactctggaccaggctccccagggctccctgagccgctcacggttctttacattcctggccaacatttcttcttcctttgagcctgggagaatgggggaaggaccagtaggagagcccccacctctccagccgcctgctctgcggctccatgattttctagtgacactgagaggtagccccgactgggagccaatgctagggctgctaggggatatgctggcactgctgggacaggagcagactccccgagatttcctggtgcaccaggcaggggtgctgggtggacttgtggaggtgctgctgggagccttagttcctgggggcccccctaccccaactcggcccccatgcacccgtgatgggccgtctgactgtgtcctggctgctgactggttgccttctctgctgctgttgttagagggcacacgctggcaagctctggtgcaggtgcagcccagtgtggaccccaccaatgccacaggcctcgatgggagggaggcagctcctcactttttgcagggtctgttgggtttgcttaccccaacaggggagctaggctccaaggaggctctttggggcggtctgctacgcacagtgggggcccccctctatgctgcctttcaggaggggctgctccgtgtcactcactccctgcaggatgaggtcttctccattttggggcagccagagcctgataccaatgggcagtgccagggagttttcttccttactctttccctcctaggtaaccttcaacagctgctcttatggggcgtccggcacaacctttcctgggatgtccaggcgctgggctttctgtctggatcaccacccccaccccctgccctccttcactgcctgagcacgggcgtgcctctgcccagagcttctcagccgtcagcccacatcagcccacgccaacggcgagccatcactgtggaggccctctgtgagaaccacttaggcccagcaccaccctacagcatttccaacttctccatccacttgctctgccagcacaccaagcctgccactccacagccccatcccagcaccactgccatctgccagacagctgtgtggtatgcagtgtcctgggcaccaggtgcccaaggctggctacaggcctgccacgaccagtttcctgatgagtttttggatgcgatctgcagtaacctctccttttcagccctgtctggctccaaccgccgcctggtgaagcggctctgtgctggcctgctcccaccccctaccagctgccctgaaggcctgccccctgttcccctcaccccagacatcttttggggctgcttcttggagaatgagactctgtgggctgagcgactgtgtggggaggcaagtctacaggctgtgccccccagcaaccaggcttgggtccagcatgtgtgccagggccccaccccagatgtcactgcctccccaccatgccacattggaccctgtggggaacgctgcccggatgggggcagcttcctggtgatggtctgtgccaatgacaccatgtatgaggtcctggtgcccttctggccttggctagcaggccaatgcaggataagtcgtgggggcaatgacacttgcttcctagaagggctgctgggcccccttctgccctctctgccaccactgggaccatccccactctgtctgacccctggccccttcctccttggcatgctatcccagttgccacgctgtcagtcctctgtcccagctcttgctcaccccacacgcctacactatctcctccgcctgctgaccttcctcttgggtccaggggctgggggcgctgaggcccaggggatgctgggtcgggccctactgctctccagtctcccagacaactgctccttctgggatgcctttcgcccagagggccggcgcagtgtgctacggacgattggggaatacctggaacaagatgaggagcagccaaccccatcaggctttgaacccactgtcaaccccagctctggtataagcaagatggagctgctggcctgctttagtcctgtgctgtgggatctgctccagagggaaaagagtgtttgggccctgcagattctagtgcaggcgtacctgcatatgcccccagaaaacctccagcagctggtgctttcagcagagagggaggctgcacagggcttcctgacactcatgctgcaggggaagctgcaggggaagctgcaggtaccaccatccgaggagcaggccctgggtcgcctgacagccctgctgctccagcggtacccacgcctcacctcccagctcttcattgacctgtcaccactcatccctttcttggctgtctctgacctgatgcgcttcccaccatccctgttagccaacgacagtgtacagcagggctacagagggtcagaggaaaacagtttggaggaagacaaagggttaagacccatgactcctcgcagcctggctgccatccgggattacagcccaggaatgaggcctgaacagaaggaggctctggcaaagcgactgctggcccctgaactgtttggggaagtgcctgcctggccccaggagctgctgtgggcagtgctgcccctgctcccccacctccctctggagaactttttgcagctcagccctcaccagatccaggccctggaggatagctggccagcagcaggtctggggccagggcatgcccgccatgtgctgcgcagcctggtaaaccagagtgtccaggatggtgaggagcaggtacgcaggcttgggcccctcgcctgtttcctgagccctgaggagctgcagagcctagtgcccctgagtgatccaacggggccagtagaacgggggctgctggaatgtgcagccaatgggaccctcagcccagaaggacgggtggcatatgaacttctgggtgtgttgcgctcatctggaggagcggtgctgagcccccgggagctgcgggtctgggcccctctcttctctcagctgggcctccgcttccttcaggagctgtcagagccccagcttagagccatgcttcctgtcctgcagggaactagtgttacacctgctcaggctgtcctgctgcttggacggctccttcctaggcacgatctatccctggaggaactctgctccttgcaccttctgctaccaggcctcagcccccagacactccaggccatccctaggcgagtcctggtcggggcttgttcctgcctggcccctgaactgtcacgcctctcagcctgccagaccgcagcactgctgcagacctttcgggttaaagatggtgttaaaaatatgggtacaacaggtgctggtccagctgtgtgtatccctggtcagcagcctattcccaccacctggccagactgcctgcttcccctgctcccattaaagctgctacaactggattccttggctcttctggcaaatcgaagacgctactgggagctgccctggtctgagcagcaggcacagtttctctggaagaagatgcaagtacccaccaaccttaccctcaggaatctgcaggctctgggcaccctggcaggaggcatgtcctgtgagtttctgcagcagatcaactccatggtagacttccttgaagtggtgcacatgatctatcagctgcccactagagttcgagggagcctgagggcctgtatctgggcagagctacagcggaggatggcaatgccagaaccagaatggacaactgtagggccagaactgaacgggctggatagcaagctactcctggacttaccgatccagttgatggacagactatccaatgaatccattatgttggtggtggagctggtgcaaagagctccagagcagctgctggcactgacccccctccaccaggcagccctggcagagagggcactacaaaacctggctccaaaggagactccagtctcaggggaagtgctggagaccttaggccctttggttggattcctggggacagagagcacacgacagatccccctacagatcctgctgtcccatctcagtcagctgcaaggcttctgcctaggagagacatttgccacagagctgggatggctgctattgcaggagtctgttcttgggaaaccagagttgtggagccaggatgaagtagagcaagctggacgcctagtattcactctgtctactgaggcaatttccttgatccccagggaggccttgggtccagagaccctggagcggcttctagaaaagcagcagagctgggagcagagcagagttggacagctgtgtagggagccacagcttgctgccaagaaagcagccctggtagcaggggtggtgcgaccagctgctgaggatcttccagaacctgtgccaaattgtgcagatgtacgagggacattcccagcagcctggtctgcaacccagattgcagagatggagctctcagactttgaggactgcctgacattatttgcaggagacccaggacttgggcctgaggaactgcgggcagccatgggcaaagcaaaacagttgtggggtcccccccggggatttcgtcctgagcagatcctgcagcttggtaggctcttaataggtctaggagatcgggaactacaggagctgatcctagtggactggggagtgctgagcaccctggggcagatagatggctggagcaccactcagctccgcattgtggtctccagtttcctacggcagagtggtcggcatgtgagccacctggacttcgttcatctgacagcgctgggttatactctctgtggactgcggccagaggagctccagcacatcagcagttgggagttcagccaagcagctctcttcctcggcaccctgcatctccagtgctctgaggaacaactggaggttctggcccacctacttgtactgcctggtgggtttggcccaatcagtaactgggggcctgagatcttcactgaaattggcaccatagcagctgggatcccagacctggctctttcagcactgctgcggggacagatccagggcgttactcctcttgccatttctgtcatccctcctcctaaatttgctgtggtgtttagtcccatccaactatctagtctcaccagtgctcaggctgtggctgtcactcctgagcaaatggcctttctgagtcctgagcagcgacgagcagttgcatgggcccaacatgagggaaaggagagcccagaacagcaaggtcgaagtacagcctggggcctccaggactggtcacgaccttcctggtccctggtattgactatcagcttccttggccacctgctatga

SEQ ID NO: 36 - DNA, 5433 bp, Artificial
  stereocilin codon optimized
atggctctgtctctgtggcctctgctgctgctcctgttgctgcttctgctgctcagcttcgccgtgacactggctccaacaggaccccactctctggatcctggcctgagctttctgaagtccctgctgagcaccctggatcaggctcctcagggcagcctgagcagatccagattcttcaccttcctggccaacatcagcagcagcttcgagcctggcagaatgggagaaggacctgtgggagaacctcctccactgcaacctccagctctgcggctgcacgattttctggtcacactgagaggcagccccgactgggaacctatgctgggactgctgggagatatgctggccctgctcggacaagagcagacccctagagatttcctggtgcatcaggctggcgtgctcggaggactggttgaagttctgcttggagcactggtgcctggcggacctcctacacctacaagacctccatgcaccagagatggccccagcgattgtgtgctggctgctgattggctgcctagcctgctcctgcttctggaaggcacaagatggcaggccctggtgcaggttcagccttctgtggatcctaccaatgccaccggcctggatggaagagaagccgctccacactttctgcagggactgcttggactgctcacacctactggcgagctgggctctaaagaagccctttggggaggcctgctgagaacagttggagcccctctgtacgccgcctttcaagagggactcctgagagtgacacacagcctgcaggacgaggtgttcagcatcctgggacagccagagcctgacaccaatggacagtgtcagggcgtgttctttctgaccctgagcctgctgggcaacctgcagcaactgcttctgtggggcgtcagacacaacctgagctgggatgtgcaggcactgggctttctgtctggaagccctccacctccaccagcactgctgcattgtctgtctactggcgtgccactgcctagagcctctcagcctagcgctcacatcagccccagacagagaagggccatcaccgtggaagctctgtgcgagaatcacctgggacctgctcctccatacagcatcagcaacttctccatccatctgctgtgtcagcacaccaagcctgccacacctcagcctcatcctagcaccacagccatctgtcagaccgccgtttggtacgccgtttcttgggctcctggtgctcaaggatggctgcaggcctgtcacgatcagttccccgacgagttcctggacgccatctgcagcaatctgagcttctctgccctgtccggcagcaatcggagactggtcaaaagactgtgcgccggactgctgcctcctccaacatcttgtcctgagggactgcctcctgtgcctctgactcccgatatcttttggggctgcttcctggaaaacgagacactgtgggccgagagactgtgtggcgaagcctctctgcaagccgtgcctccatctaatcaggcctgggtgcagcacgtttgtcagggccctacacctgacgtgacagcctctcctccttgtcacatcggaccttgcggcgagagatgtcctgatggcggcagctttctcgtgatggtctgcgccaacgacactatgtacgaggtgctggtgcccttctggccttggctggctggccagtgtagaatctccagaggcggcaacgatacctgtttcctggaaggactcctgggaccactgcttccatctctgcctccgcttggaccctctcctctgtgtcttacccctggacctttcctgctggggatgctgtctcagctgcctagatgccagtctagcgtgccagctctggcccatccaaccagactgcactatctgttgcggctgctgaccttcctccttggacctggcgctggcggagctgaagctcaaggcatgcttggcagagccctgctgctgtcatccctgcctgacaactgcagcttctgggacgccttcagacctgaaggacgcagaagcgtgctgaggaccatcggcgagtacctggaacaggatgaggaacagcctacaccaagcggcttcgaacccaccgtgaatcctagcagcggcatctccaagatggaactgctggcctgcttcagccccgtgctgtgggatctgctgcagagggaaaaaagcgtgtgggccctgcagatcctggtccaggcctatctgcacatgcctccagagaacctgcaacagctggtgctgtctgccgagagagaagctgcccagggattcctgactctgatgctgcagggaaagctgcagggcaaactccaggtgccacctagcgaagaacaggcccttggcagactgacagcactcctgctccagagataccccagactgacctctcagctgtttatcgatctgagccctctgatcccattcctggccgtgtccgacctgatgagattccctcctagtctgctggccaacgactccgtgcagcagggatacagaggcagcgaggaaaacagcctggaagaggacaaaggcctgcggcctatgacacctagatctctggccgccatccgggattacagccctggaatgaggcccgagcagaaagaggccctggctaagagactgctggctcccgagctgtttggcgaagttccagcctggcctcaagaactgctgtgggctgttctgcccctgctgccacatctgcctctggaaaacttcctgcagctgagcccacaccagattcaggccctcgaggattcttggcctgccgctggactcggacctggacatgctagacacgtgctgagaagcctggtcaaccagagcgttcaggacggcgaggaacaagtgcggagacttggacccctggcctgttttctgagccccgaggaactgcagagtctggtgcctctgtctgaccctacaggccctgttgaaaggggcctgctggaatgtgccgccaatggaacactgagccctgagggcagagtggcctatgaacttctgggagtgctgagatctagcggcggagccgttctgtcccctagggaacttagagtgtgggcacccctgtttagccagctgggcctgagattcctgcaagagctgtctgagccacagctgagggctatgctgcctgtgctccagggcacatctgtgacaccagctcaagccgtcctgctgttgggcagactgctccctagacacgatctgtccctggaagaactgtgcagcctgcacttgctgctgcctggactgtctcctcagacactgcaggccattcctcggagagtgcttgtgggagcctgtagctgtctggcccctgagctgtctagactgagcgcctgtcaaacagccgctctcctgcagaccttcagagtgaaggatggcgtgaagaacatgggcaccacaggcgctggacctgccgtgtgtattcctggacagcagcccattcctaccacctggccagattgtctgctcccactgctgcccctgaaactgctgcagctggattctctggctctgctggctaaccggcggagatattgggaactgccttggagcgaacagcaggcacagttcctgtggaagaagatgcaggtccccaccaatctgacactgcggaatctgcaggctctcggcacacttgctggcggaatgagctgcgagttcctccagcagatcaacagcatggtggactttctggaagtggtgcacatgatctaccagctgccaaccagagtgcggggaagcctgagagcttgtatttgggctgaactgcagcggcggatggccatgcctgaacctgaatggacaacagtgggccccgagctgaacggcctggactctaaacttctgctggatctccccatccagctgatggacagactgagcaacgagagcatcatgctggtggtggaactggtgcagagagccccagaacagctgctggcactgacacctctgcatcaagctgctctggccgaacgggcccttcagaatctggctcccaaagaaacccctgtgtccggggaagtgctggaaacactgggacctcttgtgggcttcctgggcaccgagtctaccagacagattcctctccagatcctgctgtcccacctgagccagctccagggattttgtctgggcgagacattcgccaccgaactcggatggttgctgctccaagagagcgtgctgggaaagcccgaactgtggtcacaggacgaagtggaacaggccggcagactggtgtttaccctgtctaccgaggccatcagtctgatccccagagaagcactgggccctgaaacactcgagaggctgctggaaaagcagcagtcttgggaacagagcagagtgggccagctgtgtagagaacctcagctggccgctaaaaaggccgcactggttgctggcgttgtcagacctgctgccgaggatctgccagagccagtgcctaattgtgccgatgtgcggggcacatttcctgccgcttggagcgctacacagatcgccgaaatggaactgagcgacttcgaggactgtctgactctgtttgccggcgatcctggactgggaccagaagaactgagagccgccatgggcaaagccaagcaactttggggacctccaagaggcttcagacccgaacagattctgcagctcggccgcctgcttatcggactgggcgatagagagctgcaagaactgatcctggtggactggggcgtgctgtctactctgggacaaatcgacggctggtccaccacacagctgcggattgtggtgtccagcttcctgaggcagtctggcagacatgtgtctcacctggacttcgtgcacctgactgccctgggctacacactgtgtggactgcggcctgaggaacttcagcacatcagctcttgggagttcagccaggcagccctgtttctgggaaccctgcatctgcagtgctccgaagaacaactggaagtgctcgcccatctgctcgtgctgccaggcggatttggccccatctctaattggggacccgagatcttcaccgagatcggcaccattgccgctggcatccctgatctggccctgtctgcactgctgagaggacagatccagggcgtgacaccactggccattagcgtgatccctccaccaaagttcgccgtggtgtttagccccattcagctgtccagcctgacatctgcccaagccgtggctgtgacccctgaacagatggcatttctgtctcccgagcagcggagagctgttgcttgggctcaacacgagggcaaagagagtcctgagcaacagggaagaagcaccgcttggggactgcaggattggtccagaccttcttggtcactggtgctgaccatcagctttctgggccacctcctgtga

SEQ ID NO: 37 - DNA, 19238 bp, Homo sapiens
gccctgccctcacctggctatcccacacaggtgagaataaccagaactcacctccggtaccagtgttcacttggaaacatggctctcagcctctggcccctgctgctgctgctgctgctgctgctgctgctgtcctttgcaggtaagaagaacagtgagcagaactggggatgaggaggagggtggctggaaaaagactttaagaatatggaggtgaacctgttagatagaaggacaaaggagagaggcagagacttgtgcaaaagggaaaaatgagggttaagaaaagcaggccaagacttactgtaggccagtgaaaggggttcagctcaccatcccctcacctcatctttagatccaggtagggaactgtgctcaggggcagggttgagtttgggctctgtgttcctctccttcagtgacctctggtttctctccttacagtgactctggcccctactgggcctcattccctggaccctggtctctccttcctgaagtcattgctctccactctggaccaggctccccagggctccctgagccgctcacggttctttacattcctggccaacatttcttcttcctttgagcctgggagaatgggggaaggaccagtaggagagcccccacctctccagccgcctgctctgcggctccatgattttctagtgacactgagaggtagccccgactgggagccaatgctagggctgctaggggatatgctggcactgctgggacaggagcagactccccgagatttcctggtgcaccaggcaggggtgctgggtggacttgtggaggtgctgctgggagccttagttcctgggggcccccctaccccaactcggcccccatgcacccgtgatgggccgtctgactgtgtcctggctgctgactggttgccttctctgctgctgttgttagagggcacacgctggcaagctctggtgcaggtgcagcccagtgtggaccccaccaatgccacaggcctcgatgggagggaggcagctcctcactttttgcagggtctgttgggtttgcttaccccaacaggggagctaggctccaaggaggctctttggggcggtctgctacgcacagtgggggcccccctctatgctgcctttcaggaggggctgctccgtgtcactcactccctgcaggatgaggtcttctccattttggggcagccagagcctgataccaatgggcagtgccagggaggtgagtgtggccagggctgggactgggatgtggcagggcaaggaaagtgaaattggggtagttttcttccttactctttccctcctaggtaaccttcaacagctgctcttatggtaagtaacaggagaccagttctgagggattgggcctggaaaatctggaggtgaagagctgaagacctcagcctctagagaggaaaactgatgggaggagtgtagtttagtggttttggggtgtgactgtctgggttggtgtcccagctccacctcttcctagccatatgaccttgagcaggttacatagtctttctatacctcagtttccccatttataaaatgagaatgataatattagttaccacagagttgttgcacccggttaaatgagttgatactgtgtatgcaaacgacttaaaaccgtgctggcacatagcgcttaataatgttagctagtaaagatgggatttggaaaataaggacacagctggattcctctacccccttactacttcagtacaacaatgccagacagtagttagacatattgagttgctgagcagatttcctaacatgaggcccgctgagggttgtgtttaagctatctaaaagcatacgaagaaaggagacagaagggggccaggtggacagaaagaattccaactggggcttctcctaggtgattttggaccttggcagggcagctttctcttttttgccccgttgcagcatttcaaccagtaacgcctaaactctcagggacctcgcttgtagaaaagcctatgcttgccatgccccttgagggctctgagtcagggtcagaatcttcagctggaggaaatgtgaactgaccagatcctgcctgctcctccctctgcacccaggggcgtccggcacaacctttcctgggatgtccaggcgctgggctttctgtctggatcaccacccccaccccctgccctccttcactgcctgagcacgggcgtgcctctgcccagagcttctcagccgtcagcccacatcagcccacgccaacggcgagccatcactgtggaggccctctgtgagaaccacttaggcccagcaccaccctacagcatttccaacttctccatccacttgctctgccagcacaccaagcctgccactccacagccccatcccagcaccactgccatctgccagacagctgtgtggtatgcagtgtcctgggcaccaggtgcccaaggctggctacaggcctgccacgaccagtttcctgatgagtttttggatgcgatctgcagtaacctctccttttcagccctgtctggctccaaccgccgcctggtgaagcggctctgtgctggcctgctcccaccccctaccagctgccctgaaggcctgccccctgttcccctcaccccagacatcttttggggctgcttcttggagaatgagactctgtgggctgagcgactgtgtggggaggcaagtctacaggctgtgccccccagcaaccaggcttgggtccagcatgtgtgccagggccccaccccagatgtcactgcctccccaccatgccacattggaccctgtggggaacgctgcccggatgggggcagcttcctggtgatggtctgtgccaatgacaccatgtatgaggtcctggtgcccttctggccttggctagcaggccaatgcaggataagtcgtgggggcaatgacacttgcttcctagaagggctgctgggcccccttctgccctctctgccaccactgggaccatccccactctgtctgacccctggccccttcctccttggcatgctatcccagttgccacgctgtcagtcctctgtcccagctcttgctcaccccacacgcctacactatctcctccgcctgctgaccttcctcttgggtccaggggctgggggcgctgaggcccaggggatgctgggtcgggccctactgctctccagtctcccagacaactgctccttctgggatgcctttcgcccagagggccggcgcagtgtgctacggacgattggggaatacctggaacaagatgaggagcagccaaccccatcaggctttgaacccactgtcaaccccagctctggtataagcaagatggagctgctggcctgctttagtgtgagtgctctgccagagggaaagctcctagaacagtgagaaggccctccaggggaattcctcgaatactcagaggcagtagtgtggggtagtagttgaagcacacagctctagagtcagacaggcttggattcatatcttggttctgtgaccagccttgaatgagttatttaacttctctgagcaatatttttctcgtctcatttataaactagggatgataatggtatatgagataatacatgctgtgggcttagcacagtgcatgatacacaaacatgcaataaatattaccttgttattcttttgggctctttgactctctcactttctgcaccagaaagaaaaaggatcaagttagaggactctaaatttttcccctagagagtgagaattggaggctggcagaatacaggaagataaggtaggaatgagaaagattcagggacactaccaatcagaagactttggttctaggttcaactgtgccacaaattagtgtgatcttaggcaagcaatttcatttagtttttctgggcttcagtttttagtctgtagaatggaggggtgagaatatgttaaacaccataattaattcactgagtgcctattatatgcaaggcactttgctaggttctgtaggatatataaagatttcttactccatgttggggccacctttttcaaaccctgggcccagtaaaatggaattagatagtctcatagtatttggttcaggtctacaagtattaattgagccaactatggacctggcatgggagagggtacaagagaaattagagatatgatcccggacctaaaagagcttaatatctgaagaatcacacttgagatgatggacaagcatcccagcaagtggagctggaatgcctgggggagctgcaggagagacagagaagacagctctgttggcatattgtctttcttcccaccagcctgtgctgtgggatctgctccagagggaaaagagtgtttgggccctgcagattctagtgcaggtaacaggtggagggcacatgggtgggctgggtgacagccatggctggaggtccctgccccgtgaggtgaggccatacccaccatgacctcctattcgcaggcgtacctgcatatgcccccagaaaacctccagcagctggtgctttcagcagagagggaggctgcacagggcttcctgacactcatgctgcaggggaagctgcaggggaagctgcaggtgagcactgagaaaggggagcaagggcacctggagcctagtgttcagagggcttgctttagtgggaggaggaactccagagaggaaatggcagggatactgagcatctccagaggcagaatccattcctgtgcccctacaggtaccaccatccgaggagcaggccctgggtcgcctgacagccctgctgctccagcggtacccacgcctcacctcccagctcttcattgacctgtcaccactcatccctttcttggctgtctctgacctgatgcgcttcccaccatccctgttagccaacgacagtgtgtaaggttcttgcactactcctcctgctcctgtcacggtcaggccaaccgcatccacctggagcagccccttccggagctcctctctgtttttttctttcatgccagataggcaatgtgccaacatcgtagcaaggtttgagagaggcacatctcacgcctgagtgtgaaaacccaatcattatgctaatgaactacaaaaggatcagagagctcctctctattaaaaccagggagaggatgggcgtggtggctcatgcctgtaatcccagcacgttgggagcccgaggcaggtggatcactaggtccgcctagtgagttcgagaccagcctggccaatatggtgaaaccccgtctctattaaactacaaaaattagccaggcatggtggtgggcgcttgtagtcccagttactctggaggctgaggcaggaggatagcttgaacctgggaggcagaggttgcagtgaaccaagatcgtgccactgcactccagcctgggtgacagagcgagactccgtcttaaaaaaaacaaaaaacaaaacaaaacaaaaaaacagggagagtctccttcctatctagacagcagggctacagagggtcagaggaaaacagtttggaggaagacaaagggttaagacccatgactcctcgcagcctggctgccatccgggattacagcccaggaatgaggcctgaacagaaggaggctctggcaaagcgactgctggcccctgaactgtttggggaagtgcctgcctggccccaggagctgctgtgggcagtgctgcccctgctcccccacctccctctggagaactttttgcagctcagccctcaccaggtatgagaatcatcttctttacttgactggcccatcttctgctagtggggacaaagagtcaatggcatgtctctcagtggcccctccctgcaagaaccctatagtgaccccagtgcgagctaaccttccccatctcagatccaggccctggaggatagctggccagcagcaggtctggggccagggcatgcccgccatgtgctgcgcagcctggtaaaccagagtgtccaggatggtgaggagcaggtacgcaggtgagttgttgtgggatcagtaaccaaggcaagagtggaagaggtagagagaggaaggcacagctgtcacgctgggtcggtgttctaggaagaaaggggcaagagagtaggcagtggcctcaggcagcatagagttccaggagagaggtctatagatggtgcccctgtgtagtggtgtagtgtcagagtgcccagtgtatgtacccataccatctgctgccaggcctgccttagtgctagtcttggggaccacacaaaggtcagcttcatgccctcctcaggcttgggcccctcgcctgtttcctgagccctgaggagctgcagagcctagtgcccctgagtgatccaacggggccagtagaacgggggctgctggaatgtgcagccaatgggaccctcagcccagaaggacgggtgagcccctcagcacaagcctacaagactttaggcttcccctgggtctgtgtggatggctttcccattgtgtcaacttgagcacagtggtgccagcccccatcccacttttgcaacctccattccttactccatggccattcttacctgttaccacctcttcctggcccttctctatctggtctgtagcaccccaaacataccctttgccattttgaacctaatctactccagtccaatccctagttccaaaccctagcccaggccctgggaaattcagatgtgggattagagaggaagttcaaggttcatctgtcttttctctccagtcctaaaccttctttggttacaggtggcatatgaacttctgggtgtgttgcgctcatctggaggagcggtgctgagcccccgggagctgcgggtctgggcccctctcttctctcagctgggcctccgcttccttcaggagctgtcagagccccagcttagagccatgcttcctgtcctgcagggaactagtgttacacctgctcaggtttgcctgtctcactccctggcatgtaccctccatccccgcttgagccccagtcaagagaatcccattcagggataaaagcagcccctcctttccctgggtgaacagtagaggtaaactctgtctgcaggaggacgccttcattccctttcctcagatcaagaagggacctgagtcactgaggatggttactagggatggttaagaggcagcgggaagttttggagggtttgccttaggaacccacttaggacctggctgctgggtcctgagagctgttgttttcggtcccatcccaacacaggctgtcctgctgcttggacggctccttcctaggcacgatgtgagtagcagcaacttctcagcctcccgccagaggtctctatcctcttttaacctggctcctgcatctgcccctcctctctctccgctcccctcatacttactgccttgctgcattgtgattgttgtcttccccaacacccttcccttcttcttcaggcctcttgtctctcttgctctttagctatccctggaggaactctgctccttgcaccttctgctaccaggcctcagcccccagacactccaggccatccctaggcgagtcctggtcggggcttgttcctgcctggcccctgaactgtcacgcctctcagcctgccagaccgcagcactgctgcagacctttcgggtatgagagtggcaaggaggatgagataatcagggataccggctctttctggttgggaggaaggcatcttccctgaggccagggaaggcctttcatacctccccacttacacacacacacacacacacacacacacacacacacacaaccaattctcatgcaggttaaagatggtgttaaaaatatgggtacaacaggtgctggtccagctgtgtgtatccctggtcaggtaagtgtgagatctcccaactgagctcctctccccattctggggcagtttcatatggctggtgctacctcccacactaccctgcagtggccctgagagttctggttagctctgtgcccattagcagccctccccagtgccagatgcaggacagcatgatccactcacattgtcctagactaatgtcaaagctggaagggcctgagaaatcttccaggccacccaccctgctttcagatgaaaagaccaaggctgggagaagctaagggactttgtttgcctggtgcctaactagcagcaacacttgaccacagcagcctgcagtgtgaggctcttaggcgtttattgctacagtggcaaatgccattccacttctgtcctagctttggtccctttccacccccatggttccttttctctgagtgctaagtacagactctctcacctatcactacactgctatacccatcaccgccagcagcctattcccaccacctggccagactgcctgcttcccctgctcccattaaagctgctacaactggattccttggctcttctggcaaatcgaagacgctactgggagctgccctggtctgagcagcaggtaattctccccacttaatttcagaacttcctccctcaatgtagtctaccttctttacctatcccttagccctatttggccagcttatccctactatcctttatttgattgtttgagatacagtctcactctgttgcccaggctgcagtgcagtggcatgatcagagttcgctgtaacctcaaactcctgagctcaggcaatctttctgcctcagcctcctgaatagctaggacgacaggtggttaccaccatgcctggctaatttttaaattttttttttgttttttgagatgaagtcttgctctgtcacccaggcttgagtacagtggcacaagcttggctcactgcaacctctgtctcccgggttcaagcgattctcctgcctcagcctcccgagtagctgggactacaggcactccccacaatgcctggctaattttttttttgttttagtagagacagggtttcaccatattggccaggctggtctcgaactgctgaccttgtgatctgcctgcctctgcctctcaaagtgctgggattacaggtgtgagccaccatgcccggccaatttttaaattttttgtagagacagacaatacaaaaatgtggacactatgtggagacactatgttgaggtactatgctgtccagattggtcttgaactcctggcctcaagcaatcctcctgccttggcctcccaaagtgctgggattacagacctgagccactgcacccagccccctagtatctcttataatgtgacttgcttttctttttctttctccttcccttttctttcatttctttctcactctcgagagaagagtgggcatctgggagagtgggaggctggtgggtcccacagagtgaggaggcaggactgggtccaaggcagtcctgcctctccactctagggggtatccttggacagtgtctcttctgggaaggggctcgtctttctttctcttgtaggcacagtttctctggaagaagatgcaagtacccaccaaccttaccctcaggaatctgcagtgagtaacttgtgttgagcagtgcgctgaattcgaccaacatttttttgagtgcttactatgtgccaggcaccatgtgatatggaatgggggatatagggatgaatgatgcatagtccctgcctcgtggacgttctcctagcacctccctttgccctcctttccttccacagtgccatgcctatcctgactagagccaaaggactcagaaaacctggattcaggttccagtcctgtcacctacttgtcctcttgggcaagtcatttaacgtccctgtgtcagttttcccttctttaaatgagaattacaatggcaccagcctcataggtagttactgtgaagattaaatgaggtaggtcatgtaagatatttaacacagtgtttggtccattgtaaagtcccagtagtcatttgctactgttagtttacttcaggatgacttcagaggcactggccaagcaagaataaataggaataagaaggtatcactttacttacacccacattagaagaacaatgggcttcagaatctttttttttttttttttttcgagacagtcttgctctgttgcccaggctggagtgcagtggcgcgatttcggctcactgcaacctctgcctcccaggttcaagcgattctcctgtctcagcctctggagtagctgggattacaggaatgtgccaccatacccagctaatttttgtatttttagtagagatggggtttcaccattttggccaggctggtctcaaactcctgacctcaggtgatccacccgcctcagcctcccaagggcttcagaatctaagacatggctctagtttcagtttaccacatttctagcagaatgatgttgggaatgtcacctgacttccataaatccttattttctcctctgataaacagcagtgatgttatggggagctgatgagatatctatgtaaaaacatttctcaaaccataaattacggtggatgaacatctgtacttgtgttgagagtactgatatcaaggagcaaacaggctgttgtatgtgttgaatgagcctctccccactcacacacccacagggctctgggcaccctggcaggaggcatgtcctgtgagtttctgcagcagatcaactccatggtagacttccttgaagtggtgcacatgatctatcagctgcccactagagttcgagggagcctggtgagagggggtgcctggactttagtgggagcagggaggctgggaccctaggtatagaacccagctcctatgttctgctctggcctcacactgcttccctacagagggcctgtatctgggcagagctacagcggaggatggcaatgccagaaccagaatggacaactgtagggccagaactgaacgggctggatagcaagctactcctggacttaccgtaagtactgcagctagagatattggcccctcagaaagctcaatctggggtgaagatctgcccttagggaatgccctggaggaggtagtttttctgtctggtagttccctgacataatttatagcccaaagcagaggattttattcaaagttgctctatgtattgactggttcccagaatatgctccagcacagggcagctgagggtggcaacactgtattgaagcctgccaagtaatcttacaataacctagtccacattaattgagattgagacagagcatctgaagtgagggaggcaatgctccaaatctgccccagaggattgtagtttgctcagggcactgtgttcttagtgcattcagaggagtagatcgagagaaaaatatatgaaaaatgtgataaataccttcaaatacctgaggggctatcaagtagaaattagattgtcatatttatgagtggccccattgggcaagactaagagtagttaacggagatcagatttttacatagtataagaaaaactaaggtagtgagttcctggtccttggagctgttcgagcctaagccagatggccccatggcaggaatgttgtagagcacgttcatatacaggttgtgggaagaaaaggctataggaacccaaggctcctccctacccatggagaaatttattagtatgttactcatatgctgcttttctcattttacccctaccaccaccccgttgccatccgcactgtaagtcaggataggaaaatgctggtgttacagtcttcctggggaatatggagctgaagtggagtaaaagcagttgacttcattcctacttttttcttttttttctttttttttttttttgagacagagttttgctgtgtcaccaaggctggagtgcagtgacgtgatctcggctcactgcaacctccatcttccaggttcaagcaattctcctgcctcagtctcccgagtagctgggactgtaggtgtgcaccaccatgccaggctaatttttgtatttgttgtagggacgagctttcaccatgttggccaggctggtcttgaactcctggcttcaagtgatctgcccacctcggcttcccaacattcttatatttttataggcctttccacagatttcagctcttgtatgacttagcccagttccagaactggtaatcctaggtagggtacaggttatcacctctgatttcgggtaaaagggatttatttatttatttgtttatttatttatatttttgagacagagtctcgctctgtcacccaggctggagtgcaatggtgccatctcggctcactgcaacctctccctctggggttcaagcaattctcctgcctcagcctgctgagtagctgggattacaggcgcgtgccaccacacccggctaatttttgcatttttagtagagacggggtttcaccatgttgctcagggtggtctcgaatttctgaccctgtgatctgcctgcctcggcctcccaaagtgctgggattacaggcatgagccactgcgtccggcctgtttttacttttttttaatgccattcagatctgtttaaatatgtgggttctgtgagataatttagaatcccaaggttacagatgaggtgaaagatcctagaccatgcatcaaaaaacttgagtttctcatttgtgaaagaaggataagagaaacacctattttgtctgggtgcagtggctcatgcctataatcccagcatttggggaggccaaggtgggtggatcacggaggtcaggtgttcaagaccagactggccaacatggcaaaacaccatctctactaaaaatacaaaagttagctgggcgtggtggcacgtgcgtgtaattccagctattcgggaggctgaggcacgagaattgcttgaacctgggaggtgcgggttgcagtgaactgagatcgcagcaccactgtgctccagcctgagtgatggagtgaggccaggtcttgttgtaggatcaaatgagataacacctgaaagaactttgtaaattgtatagcacgtacaaacaagaagggacctcttcacaagcagaggaagggtggtcctgtggaaaaaaacgggaattgggagtgagagacctcaacatttgatctctgtgaacctcagttttttaatctataaaatggggaaatgttaatggtacttaatatttggagcttttgagtccattagatcaggtaggattgttcgttattttttttttttaggaagactagaaatatgttgctccctttttctcccccactcaagcttgatggtgggaattggccctggagctgtttactatcagttcctgtccagcttcactaaatttggtctggggtcacatcttagctgcggactgtggggttttgtggtcccttctcgacttggcccagctccacctgaatcctgttgttgtcaaattgctgtaataggatccagttgatggacagactatccaatgaatccattatgttggtggtggagctggtgcaaagagctccagagcagctgctggcactgacccccctccaccaggcagccctggcagagagggcactacaaaacctggtaagagtccaccctaccagactcagatttgctgccctgggcaattcttgctcctcagacaatgctctctgactgtcccccaaccctctacttcttgctttcttgctgccaaacagattcctgtctacaaggcctggcccctgttttgcctctgggttctgttccttgataatatgcttcacgttacttgtccatacctcttggagtccgagaaatctcttggagtccacctctcagtctttctgcctgctcctatctgggctcattgcttaaggaagtgaacaaaggtagtgagcatcatagggtgctgagctgggagcaggagggagggaaggttagggggcttggtgtcttgatcaaggtgtctggtattctgagtcagaagtgcattgtccaagttctgatgctcttctccaggctccaaaggagactccagtctcaggggaagtgctggagaccttaggccctttggttggattcctggggacagagagcacacgacagatccccctacagatcctgctgtcccatctcagtcagctgcaaggcttctgcctaggagagacatttgccacagagctgggatggctgctattgcaggagtctgttcttgggtatggaccttcgagaacttcagattctaactcattctatacccagtccctcagccaccatcatcagtggcagcctgttccatattcttaaggtcccctggagccctgtgtccgaaatcctagcatgtcctcttttccccttccttttcctcacagttccctcagctccccagcccccgattttcttcctgtccccaggaaaccagagttgtggagccaggatgaagtagagcaagctggacgcctagtattcactctgtctactgaggcaatttccttgatccccagggtgagatgaaggaagaagggaagggagtaaatgcatagaggggactggtgagctggttatggggacccgtggccaaagagggcaaaggatatgaagcctagatctggggggagactgcaaaacagagacaggactttggacttagagctatagcagcaggtcctgatctgtccagatctccccactctccttctaccttctcatgcaggaggccttgggtccagagaccctggagcggcttctagaaaagcagcagagctgggagcagagcagagttggacagctgtgtagggagccacagcttgctgccaagaaagcagccctggtagcaggggtggtgcgaccagctgctgaggatcttccaggtgaaactacccaaatacttatatgtccagcaggatgtacagggagtatcaaacggtctgggttctacatgtgctcttccctgggactgggttttctaatttataaagcaaagagtttagagggatgatcttcaagcctcttgtagttctagaattctgtagttctgggagtttgtaaactattaagttttcttttagcccagaacttccattttcctgctctctcgtgtctgctctagactcagctctagctcggctaagtgtggagctctctgctggggagatccctagaagctttgaaggagacattgtgaggctggagaactgggttcaaattcagtgctaccattaaatctctgaataacatcctcagtcttccatctataaaagtcttggcatctccaatcacttcttgttctattatctcctaagccctatacatattactctgtaatactcctttgatccctatttctcacagtgctctatcctccaaaggttggaagactcactctatctacagatatctctctgggcatattttattactgcgctgacctcctggccctgccttcccccttcagaacctgtgccaaattgtgcagatgtacgagggacattcccagcagcctggtctgcaacccagattgcagagatggagctctcagactttgaggactgcctgacattatttgcaggagacccaggacttgggcctgaggaactgcgggcagccatgggcaaagcaaaacaggttagggatggagagccaactggggttggccatgaggaagctatttgggtgtgatgtaggacacaaagagaatggagagttggatgagaggtgggggaagcaagagatagaagagttagaagatttgggtcacaagtaggaggtgaagggagataaatattgaggaaagagagctagtataatgaatagagggacgaaagcagtggttaccaaattttaatgcatatcacgatcatcaagggaacagatttttttctttatttttttttctttcttaaaaaaataatggcatgcttcggctgggtgcagcggctcacgcctataatctcagaactttgggaggccaaggcgggcagatcacgaggtcaggagatcaagaccatcctgtctaacacggcgaaacacggtctctactaaaaatacaaaaaagttagccgggcatggtggtgcacacttgttgtcccagctacttgggaggctgaggcaggagaatggcgtgaacctgggagggggagcttgcagtgagccgaagtcaagccaatgcactccatcctgggtgacagagcaagactccatctcaaaaaaaaaaaaaaaaaaaaaaggcatgcttcatgaatttgcgtgttatccttgcacaggcgccatgcaaatctctgtatcattccaattttttggggtatgtgctgctgaactgagcatgggaacagtgccagtgccagattaccatgcttcactgacttaataaaaacctttggggaggctgggcgcagtgactcatgcctgtaatcacagcactttgggaggcggaggcaggtggattgcttgagcccaggagttagagaccagactgggcaacatggtgaaaccctgtctctactaaaaatagaaaaaacattagctgggtgtggcggcacatgcctgtaatcccagctactcaggaggctggggtaggagaatcccatgagtgcaggaggtggagggtgcaatgtgccaagatcgcaccactgccctccagcctgggtgtcagagcaagaccctgtctcataaattaaaaaataagcctctgggggaaagagtctagacatctgcatctcctttttttttttttttttttttttttgagacagagtctcactctgtcacccagcatccaggctggagtgcagtggtgtgatcttggctcactgtaacctctacatcctgggttcaaacgatcctcctgcctcagcctctcaagtagctgggactacaggtgcaccacacctggctaatttttgtatctttggtagagatggggtttcactatgttgcccaggatggtctcgaacttctgggctcaagcaatcctcccacctcagcctcccaaagtgctgggattacagctgttagccactgtgctgggccctaggcatctgttttaataagcgtctctgtgtctgatgcacataaaagtgtggaactcatggactagagttagtttgctcttcttttccactgattgtaatgtctttcaaaacaccttagaggaactgtaaggcaacggtctcattttatagtggaggaaactaaagaaaaggcaaatgatttacctagagttatacagctaagggcagaggcaagacttaaaacccagcagtatgactcccaatccactgcttttccactcacattgttcctgtctttctcctagttgtggggtcccccccggggatttcgtcctgagcagatcctgcagcttggtaggctcttaataggtctaggagatcgggaactacaggagctgatcctagtggactggggagtgctgagcaccctggggcagatagatggctggagcaccactcaggtaacacttttcctcctccctacggcttcccaaacacccatcccacagacccagccctatagatcatctaaagcccaaggaatttttttcctgtgaccctacctggtccttctttctatcttttgttgataccccatactagtgaccttcaggactctgatttattcactctgaggccctggacacataatactgtctcctacctcttttcctggaggcttcctctttttctttccttttcttttctgagtcctcagccttccccatgactccttaggtcttaatagtaacagaatataacccagtaacacctatcacttccctgtccattaattctccataactttcctccttcccctcttctcccaccccccaccccagctccgcattgtggtctccagtttcctacggcagagtggtcggcatgtgagccacctggacttcgttcatctgacagcgctgggttatactctctgtggactgcggccagaggagctccagcacatcagcagttgggagttcaggtcatttgtgaaggggctgagggtggtggtgctgaggtaaaggtggacttactggggaaagaaggatcatgaaggtctggtcccatggaggaagggaactcatttgaagccatctcttcctttgtctcatgaccacagcccctttcactgaagccgaattcttcttccttccttcctactgttctacagccaagcagctctcttcctcggcaccctgcatctccagtgctctgaggaacaactggaggttctggcccacctacttgtactgcctggtgggtttggcccaatcagtaactgggggcctgagatcttcactgaaattggcaccatagcaggtggggagctgggccactgctggtgcaagttggtttggtttctataccatgggtggactggatggaagactgccctgcaattcttaaggtgggggcctgagggtgtttaaataaggggctagagacatattggggaaggtctatgatagggcactttgggagtagttagagaaggtctataggtttgaagagagggaaggtcagtctaagacaatgtttggatgccacttgcttcaacagctgggatcccagacctggctctttcagcactgctgcggggacagatccagggcgttactcctcttgccatttctgtcatccctcctcctaaatttgctgtaagtattaatggactggggtgaccacaggagagccagggcccaatggggactacatgcatgcactgattcctacccctgccctcaggtggtgtttagtcccatccaactatctagtctcaccagtgctcaggctgtggctgtcactcctgagcaaatggcctttctgagtcctgagcagcgacgagcagttgcatgggcccaacatgagggaaaggagagcccagaacagcaaggtgagttcccagctgcacagcttgatcctccatctcctgacccagaatcaaacccctaatttggtgctgtctggctcttagagtgcacccagggagatccctggagtgaaggagtctacaggcagagcgctaatttccaagtatcaatgctcctggagagctgagttgtgatattactcccattccctgtctattataggtcgaagtacagcctggggcctccaggactggtcacgaccttcctggtccctggtattgactatcagcttccttggccacctgctatgagcctgtctctacagtagaaggagattgtggggagagaaatcttaagtcataatgaataaagtgcaaacagaagtgcatcctgattattttcagaagctgatgaggaata

SEQ ID NO: 38 - DNA, 18884 bp, Homo sapiens
gccctgccctcacctggctatcccacacaggtgagaataaccagaactcacctccggtaccagtgttcacttggaaacatggctctcagcctctggcccctgctgctgctgctgctgctgctgctgctgctgtcctttgcaggtaagaagaacagtgagcagaactggggatgaggaggagggtggctggaaaaagactttaagaatatggaggtgaacctgttagatagaaggacaaaggagagaggcagagacttgtgcaaaagggaaaaatgagggttaagaaaagcaggccaagacttactgtaggccagtgaaaggggttcagctcaccatcccctcacctcatctttagatccaggtagggaactgtgctcaggggcagggttgagtttgggctctgtgttcctctccttcagtgacctctggtttctctccttacagtgactctggcccctactgggcctcattccctggaccctggtctctccttcctgaagtcattgctctccactctggaccaggctccccagggctccctgagccgctcacggttctttacattcctggccaacatttcttcttcctttgagcctgggagaatgggggaaggaccagtaggagagcccccacctctccagccgcctgctctgcggctccatgattttctagtgacactgagaggtagccccgactgggagccaatgctagggctgctaggggatatgctggcactgctgggacaggagcagactccccgagatttcctggtgcaccaggcaggggtgctgggtggacttgtggaggtgctgctgggagccttagttcctgggggcccccctaccccaactcagcccccatgcacccgtgatgggccgtctgactgtgtcctggctgctgactggttgccttctctgctgctgttgttagagggcacacgctggcaagctctggtgcaggtgcagcccagtgtggaccccaccaatgccacaggcctcgatgggagggaggcagctcctcactttttgcagggtctgttgggtttgcttaccccaacaggggagctaggctccaaggaggctctttggggcggtctgctacgcacagtgggggcccccctctatgctgcctttcaggaggggctgctccgtgtcactcactccctgcaggatgaggtcttctccattttggggcagccagagcctgataccaatgggcagtgccagggaggtgagtgtggccagggctgggactgggatgtggcagggcaaggaaagtgaaattggggtagttttcttccttactctttccctcctaggtaaccttcaacagctgctcttatggtaagtaacaggagaccagttctgagggattgggcctggaaaatctggaggtgaagagctgaagacctcagcctctagagaggaaaactgatgggaggagtgtagtttagtggttttggggtgtgactgtctgggttggtgtcccagctccacctcttcctagccatatgaccttgagcaggttacatagtctttctatacctcagtttccccatttataaaatgagaatgataatattagttaccacagagttgttgcacccggttaaatgagttgatactgtgtatgcaaacgacttaaaaccgtgctggcacatagcgcttaataatgttagctagtaaagatgggatttggaaaataaggacacagctggattcctctacccccttactacttcagtacaacaatgccagacagtagttagacatattgagttgctgagcagatttcctaacatgaggcccgctgagggttgtgtttaagctatctaaaagcatatgaagaaaggagacagaagggggccaggtggacagaaagaattccaactggggcttctcctaggtgattttggaccttggcagggcagctttctcttttttgccccgttgcagcatttcaaccagtaacgcctaaactctcagggacctcgcttgtagaaaagcctatgcttgccatgccccttgagggctctgagtcagggtcagaatcttcagctggaggaaatgtgaactgaccagatcctgcctgctcctccctctgcacccaggggcgtccggcacaacctttcctgggatgtccaggcgctgggctttctgtctggatcaccacccccaccccctgccctccttcactgcctgagcacgggcgtgcctctgcccagagcttctcagccgtcagcccacatcagcccacgccaacggcgagccatcactgtggaggccctctgtgagaaccacttaggcccagcaccaccctacagcatttccaacttctccatccacttgctctgccagcacaccaagcctgccactccacagccccatcccagcaccactgccatctgccagacagctgtgtggtatgcagtgtcctgggcaccaggtgcccaaggctggctacaggcctgccacgaccagtttcctgatgagtttttggatgcgatctgcagtaacctctccttttcagccctgtctggctccaaccgccgcctggtgaagcggctctgtgctggcctgctcccaccccctaccagctgccctgaaggcctgccccctgttcccctcaccccagacatcttttggggctgcttcttggagaatgagactctgtgggctgagcgactgtgtggggaggcaagtctacaggctgtgccccccagcaaccaggcttgggtccagcatgtgtgccagggccccaccccagatgtcactgcctccccaccatgccacattggaccctgtggggaacgctgcccggatgggggcagcttcctggtgatggtctgtgccaatgacaccatgtatgaggtcctggtgcccttctggccttggctagcaggccaatgcaggataagtcgtgggggcaatgacacttgcttcctagaagggctgctgggcccccttctgccctctctgccaccactgggaccatccccactctgtctgacccctggccccttcctccttggcatgctatcccagttgccacgctgtcagtcctctgtcccagctcttgctcaccccacacgcctacactatctcctccgcctgctgaccttcctcttgggtccaggggctgggggcgctgaggcccaggggatgctgggtcgggccctactgctctccagtctcccagacaactgctccttctgggatgcctttcgcccagagggccggcgcagtgtgctacggacgattggggaatacctggaacaagatgaggagcagccaaccccatcaggctttgaacccactgtcaaccccagctctggtataagcaagatggagctgctggcctgctttagtgtgagtgctctgccagagggaaagctcctagaacagtgagaaggccctccaggggaattcctcgaatactcagaggcagtagtgtggggtagtagttgaagcacacagctctagagtcagacaggcttggattcatatcttggttctgtgaccagccttgaatgagttatttaacttctctgagcaatatttttctcgtctcatttataaactagggatgataatggtatatgagataatacatgctgtgggcttagcacagtgcatgatacacaaacatgcaataaatattaccttgttattcttttgggctctttgactctctcactttctgcaccagaaagaaaaaggatcaagttagaggactctaaatttttcccctagagagtgagaattggaggctggcagaatacaggaagataaggtaggaatgagaaagattcagggacactaccaatcagaagactttggttctaggttcaactgtgccacaaattagtgtgatcttaggcaagcaatttcatttagtttttctgggcttcagtttttagtctgtagaatggaggggtgagaatatgttaaacaccataattaattcactgagtgcctattatatgcaaggcactttgctaggttctgtaggatatataaagatttcttactccatgttggggccacctttttcaaaccctgggcccagtaaaatggaattagatagtctcatagtatttggttcaggtctacaagtattaattgagccaactatggacctggcatgggagagggtacaagagaaattagagatatgatcccggacctaaaagagcttaatatctgaagaatcacacttgagatgatggacaagcatcccagcaagtggagttggaatgcctgggggagctgcaggagagacagagaagacagctctgttggcatattgtctttcttcccaccagcctgtgctgtgggatctgctccagagggaaaagagtgtttgggccctgcagattctagtgcaggtaacaggtggagggcacatgggtgggctgggtgacagccatggctggaggtccctgccccgtgaggtgaggccatacccaccatgacctcctattcgcaggcgtacctgcatatgcccccagaaaacctccagcagctggtgctttcagcagagagggaggctgcacagggcttcctgacactcatgctgcaggggaagctgcaggggaagctgcaggtgagcactgagaaaggggagcaagggcacctggagcctagtgttcagagggcttgctttagtgggaggaggaactccagagaggaaatggcagggatactgagcatctccagaggcagaatccattcctgtgcccctacaggtaccaccatccgaggagcaggccctgggtcgcctgacagccctgctgctccagcggtacccacgcctcacctcccagctcttcattgacctgtcaccactcatccctttcttggctgtctctgacctgatgcgcttcccaccatccctgttagccaacgacagtgtgtaaggttcttgcactactcctcctgctcctgtcacggtcaggccaaccgcatccacctggagcagccccttccggagctcctctctgtttttttctttcatgccagataggcaatgtgccaacatcgtagcaaggtttgagagaggcacatctcacgcctgagtgtgaaaacccaatcattatgctaatgaactacaaaaggatcagagagctcctctctattaaaaccagggagaggatgggcgtggtggctcatgcctgtaatcccagcacgttgggagcccgaggcaggtggatcactaggtccgcctagtgagttcgagaccagcctggccaatatggtgaaaccctgtctctattaaactacaaaaattagccaggcatggtggtgggcgcttgtagtcccagttactctggaggctgaggcaggaggatagcttgaacctgggaggcagaggttgcagtgagccaagatcgtgccactgcactccagcctgggtgacagagcgagactccgtcttaaaaaaaacaaaaaacaaaacaaaacaaaaaaacagggagagtctccttcctatctagacagcagggctacagagggtcagaggaaaacagtttggaggaagacaaagggttaagacccatgactcctcgcagcctggctgccatccgggattacagcccaggaatgaggcctgaacagaaggaggctctggcaaagcgactgctggcccctgaactgtttggggaagtgcctgcctggccccaggagctgctgtgggcagtgctgcccctgctcccccacctccctctggagaactttttgcagctcagccctcaccaggtatgagaatcatcttctttacttgactggcccatcttctgctagtggggacaaagagtcaatggcatgtctctcagtggcccctccctgcaagaaccctatagtgaccccagtgcgagctaaccttccccatctcagatccaggccctggaggatagctggccagcagcaggtctggggccagggcatgcccgccatgtgctgcgcagcctggtaaaccagagtgtccaggatggtgaggagcaggtacgcaggtgagttgttgtgggatcagtaaccaaggcaagagtggaagaggtagagagaggaaggcacagctgtcacgctgggtcggtgttctaggaagaaaggggcaagagagtaggcagtggcctcaggcagcatagagttccaggagagaggtctatagatggtgcccctgtgtagtggtgtagtgtcagagtgcccagtgtatgtacccataccatctgctgccaggcctgccttagtgctagtcttggggaccacacaaaggtcagcttcatgccctcctcaggcttgggcccctcgcctgtttcctgagccctgaggagctgcagagcctagtgcccctgagtgatccaacggggccagtagaacgggggctgctggaatgtgcagccaatgggaccctcagcccagaaggacgggtgagcccctcagcacaagcctacaagactttaggcttcccctgggtctgtgtggatggctttcccattgtgtcaacttgagcacagtggtgccagcccccatcccacttttgcaacctccattccttactccatggccattcttacctgttaccacctcttcctggcccttctctatctggtctgtagcaccccaaacataccctttgccattttgaacctaatctactccagtccaatccctagttccaaaccctagcccaggccctgggaaattcagatgtgggattagagaggaagttcaaggttcatctgtcttttctctccagtcctaaaccttctttggttacaggtggcatatgaacttctgggtgtgttgcgctcatctggaggagcggtgctgagcccccgggagctgcgggtctgggcccctctcttctctcagctgggcctccgcttccttcaggagctgtcagagccccagcttagagccatgcttcctgtcctgcagggaactagtgttacacctgctcaggtttgcctgtctcactccctggcatgtaccctccatccccgcttgagccccagtcaagagaatcccattcagggataaaagcagcccctcctttccctgggtgaacagtagaggtaaactctgtctgcaggaggacgccttcattccctttcctcagatcaagaagggacctgagtcactgaggatggttactggggatggttaagaggcagcgggaagttttggagggtttgccttaggaacccacttaggacctggctgctgggtcctgagagctgttgttttcggtcccatcccaacacaggctgtcctgctgcttggacggctccttcctaggcacgatgtgagtagcagcaacttctcagcctcccgccagaggtctctatcctcttttaacctggctcctgcatctgcccctcctctctctccgctcccctcatacttactgccttgctgcattgtgattgttgtcttccccaacacccttcccttcttcttcaggcctcttgtctctcttgctctttagctatccctggaggaactctgctccttgcaccttctgctaccaggcctcagcccccagacactccaggccatccctaggcgagtcctggtcggggcttgttcctgcctggcccctgaactgtcacgcctctcagcctgccagaccgcagcactgctgcagacctttcgggtatgagagtggcaaggaggatgagataatcagggataccggctctttctggttgggaggaaggcatcttccctgaggccagggaaggcctttcatacctccccacttacacacacacacacacacacacacacacaaccaattctcatgcaggttaaagatggtgttaaaaatatgggtacaacaggtgctggtccagctgtgtgcatccctggtcaggtaagtgtgagatctcccaactgagctcctctccccattctggggcagtttcatatggctggtgctacctcccacactaccctgcagtggccctgagagttctggttagctctgtgcccattagcagccctccccagtgccagatgcaggacagcatgatccactcacattgtcctagactaatgtcaaagctggaagggcctgagaaatcttccaggccacccaccctgctttcagatgaaaagaccaaggctgggagaagctaagggactttgtttgcctggtgcctaactagcagcaacacttgaccacagcagcctgcagtgtgaggctcttaggcgtttattgctacagtggcaaatgccattccacttctgtcctagctttggtccctttccacccccatggttccttttctctgagtgctaagtacagactctctcacctatcactacactgctatacccatcaccgccagcagcctattcccaccacctggccagactgcctgcttcccctgctcccattaaagctgctacaactggattccttggctcttctggcaaatcgaagacgctactgggagctgccctggtctgagcagcaggtaattctccccacttaatttcagaacttcctccctcaatgtagtctaccttctttacctatcccttagccctatttggccagcttatccctactatcctttatttgattgtttgagatacagtctcactctgttgcccaggctgcagtgcagtggcatgatcagagttcgctgtaacctcaaactcatgagctcaggcaatctttctgcctcagcctcctgaatagctaggatgacaggtggttaccaccatgcctggctaatttttaaattttttttttgttttttgagatgaagtcttgctctgtcacccaggcttgagtacagtggcacaagcttggctcactgcaacctctgtctcccgggttcaagcgattctcctgcctcagcctcccgagtagctgggactacaggcactccccacaatgcccggctaattttttttttgttttagtagagacagggtttcaccatattggccaggctggtctcgaactgctgaccttgtgatctgcctgcctctgcctctcaaagtgctgggattacaggtgtgagccaccatgcccggccaatttttaaattttttgtagagacagacaatacaaaaatgtggacactatgtggagacactatgttgaggtactatgctgtccagattggtcttgaactcctggcctcaagcaatcctcctgccttggcctcccaaagtgctgggattacagacctgagccactgcacccagccccctagtatcccttataatgtgacttgcttttctttttctttctccttcccttttctttcatttctttctcactctcgagagaagagtgggcatctgggagagtgggaggctggtgggtcccacagagtgaggaggcaggactgggtccaaggcagtcctgcctctccactctagggggtatccttggacagtgtctcttctgggaaggggctcgtctttctttctcttgtaggcacagtttctctggaagaagatgcaagtacccaccaacctgaccctcaggaatctacagtgagtaacttgtgttgagcagtgcgctgaattcgaccaacatttttttgagtgcttactatgtgccaggcaccatatgatatggaatgggggatatagggatgaatgatgcatagtccctgcctcgtggacgttctcctagcacctccctttgccctcctttccttccacagtgccatgcctatcctgactagagccaaaggactcagaaaacctggattcaggttccagtcctgtcacctacttgtcctcttgggcaagtcatttaacgtccctgtgtcagttttcccttctttaaatgagaattacaatggcaccagcctcataggtagttactgtgaagattaaatgaggtaggtcatgtaagatatttaacacagtgtttggtccattgtaaagttccagtagtcatttgctactgttagtttacttcaggatgacttcagaggcactggccaagcaagaataaataggaataagaaggtatcactttacttatacccacattagaagaacaatgggcttcagaatctttttttttttttttttcgagacagtcttgctctgttgcccaggctggagtgcagtggcgcgatttcggctcactgcaacctctgcctcccaggttcaagcgattctcctgtctcagcctctggagtagctgggattacaggaatgtgccaccatacccagctaatttttgtatttttagtagagatggggtttcaccattttggccaggctggtctcaaactcctgacctcaggtgatccacccgcctcagcctcccaagggcttcagaatctaagacatgtctctagtttcagtttaccacatttctagcagaatgatgttgggaatgtcacctgacttccataaatccttattttctcctctgataaacagcagtgatgttatggggagctgatgagatatctatgtaaaaacatttctcaaaccataaattacggtggatgaacatctgtacttgtgttgagagtactgatatcaaggagcaaacaggctgttgtatgtgttgaatgagcctctccccactcacacacccacagggctctgggcaccctggcaggaggcatgtcctgtgagtttctgcagcagatcaactccatggtagacttccttgaagtggtgcacatgatctatcagctgcccactagagttcgagggagcctggtgagaggggatgcctggactttagtgggagcagggaggctgggaccctaggtatagaacccagctcctatgttctgctctggcctcactctgcttccctacagagggcctgtatctgggcagagctacagcggaggatggcaatgccagaaccagaatggacaactgtagggccagaactgaacgggctggatagcaagctactcctggacttaccgtaagtactgcagctagagatattggcccctcagaaagctcaatctggggtgaagatctgcccttagggaatgccctggaggaggtagtttttctgtctggtagttccctgacataatttatagcccaaagcagaggattttattcaaagttgctctatgtattgactggttcccagaatatgctccagcacagggcagctgagggtggcaacactgtattgaagcctgccaagtaatcttacaataacctagtccacattaattgagattgagacagagcatctgaagtgagggaggcaatgctccaaatctgccccagaggattgtagtttgctcagggcactgtgttcttagtgcattcagaggagtggatcgagagaaaaatatatgaaaaatgtgataaataccttcaaatacctgaggggctatcaagtagaaattagattgtcatatttatgagtggccccattgggcaagactaagagtagttaacggagatcagatttttacatagtataagaaaaactaaggtagtgagttcctggtccttggagctgttcgagcctaagccagatggccccatggcaggaatgttgtagagcacgttcatatacaggttgtgggaagaaaaggctataggaacccaaggctcctccctacccatggagaaatttattagtatgttactcatatgctgcttttctcattttacccctaccaccaccccgttgccatccgcactgtaagtcaggataggaaaatgctggtgttacagtcttcctggggaatatggagctgaagtggagtaaaagcagttgacttcattcttacttttttctttttctttttttttttttttttgagacagagttttgctgtgtcaccaaggctggagtgcagtgacgtgatctcggctcactgcaacctccatcttccaggttcaagcaattctcctgcctcagtctcccgagtagctgggactgtaggtgtgcaccaccatgccaggctaatttttgtatttgttgtagggacgagctttcaccatgttggccaggctggtcttgaactcctggcttcaagtgatctgcccacctcggcttcccaacattcttatatttttataggcctttccacagatttcagctcttgtatgacttagcccagttccagaactggtaatcctaggtagggtacaggttatcacctctgatttcgggtaaaagggatttatttatttatttgtttatttatttatatttttgagacagagtctcgctctgtcacccaggctggagtgcaatggtgccatctcggctcactgcaacctctccctctggggttcaagcacttctgcctcagcctcctgagtagctgggattacaggcgcgtgccaccacacccggctaatttttgcatttttagtagagacggggtttcaccatgttgctcagggtggtctcgaatttctgaccctgtgatctgcctgcctcggcctcccaaagtgctgggattacaggcatgagccactgcgtccggcctgtttttacttttttttaatgccattcagatctgtttaaatatgtgggttctgtgagataatttagaatcccaaggttacagatgaggtgaaagatcctagaccatgcatcaaaaaacttgagtttctcatttgtgaaagaaggataagagaaacacctattttgtctgggtgcagtggctcatgcctataatcccagcatttggggaggccaaggtgggtggatcacggaggtcaggtgttcaagaccagactggccaacatggcaaaacaccatctctactaaaaatacaaaagttagctgggcgtggtggcacgtgcgtgtaattccagctattcgggaggctgaggcacgagaattgcttgaacctgggaggtgcgggttgcagtgaactgagatcgcagcaccactgtgctccagcctgagtgatggagtgaggccaggtcttgttgtaggatcaaatgagataacacctgaaagaactttgtaaattgtatagcacgtacaaacaagaagggacctcttcacaagcagaggaagggtggtcctgtggaaaaaaacgggaattgggagtgagagacctcaacatttgatctctgtgaacctcagttttttaatctataaaatggggaaatgttaatggtacttaatatttggagcttttgagtccattagatcaggtaggattgttcgttattttttttttttaggaagactagaaatatgttgctccctttttctcccccactcaagcttgatggtgggaattggccctggagctgtttactgtcagttcctgtccagcttcactaaatttggtctggggtcacatcttagctggggactgtggggttctgtggtcccttctcgacttggcccagctccacttgaatgatattgttgtcaaattgctataatagaatccagttgatggacagactatccaatgaatccattatgttggtggtggagctggtgcaaagagctccagagcagctgctggcactgacccccctccaccaggcagccctggcagagagggcactacaaaacctggtaagagtccaccctaccagactcagatttgctgccctgggcaattcttgctcctcagacaatgctctctgactgtcctccaaccctctacttcttgctttcttgctgccaaacaggttcctgtctacaaggcctggcccgttttgcctctgggttctgttccttgataatatgcttcacgttacttgtccatacctcttggagtccgagaaatctcttggagtccacctctcagtctttctgcctgctcctatctggtctcattgcttaagaaagtgaacaaaggtagtgagcatcatagggtgctgagttgggagcaggagggagggaaggtcagggggcttggtgtcttgatcaaggtgtctggtattctgagtcagaagtgcattgtccaagttctgatgctcttctccaggctccaaaggagactccagtctcaggggaagtgctggagaccttaggccctttggttggattcctggggacagagagcacacgacagatccccctacagatcctgctgtcccatctcagtcagctgtaaggcttctgcctaggagagacatttgccacagagctgggatggctgctattgcaggagtctgttcttgggtatggatcttcgagaacttcagattctaactcattctatacccagtccctcagccaccatcatcagtggcagcctgttccatattcctaagggcccttggagccctgtgtccgaaatcctagcatgtcctcttttccccttccttttcctcacagttccctcagctccccagcccccgattttcttcctgtccccaggaaaccagagttgtggagccaggatgaagtagagcaagctggacgcctagtattcactctgtctactgaggcaatttccttgatccccagggtgagatgaaggaagaagggaagggagtaaatgcatagaggggactggtgagctggttatggggacccgtggccaacgagggcaaaggatatgaagcctagatctggggggatactgcgaaacagagacaggactttggacttatagctatagcagcaggtcctgatctgtccagatctccccactctccttctaccttctcatgcaggaggccttgggtccagagaccctggagcggcttctagaaaagcagcagagctgggagcagagcagagttggacagctgtgtagggggccacagcttgctgccaagaaagcagccctggtagcaggggtggtgcgaccagctgctgaggatcttccaggtgaaactacccaaatacttatatgtccagcaggatgtacagggagtatcaaacggtctgggttctacatgtgcttttctctgggactgggttttctaatttataaagcaaagagtttagagggatgatcttcaagtctcgtctagttctaaaattctatagctctgggagtgtgtaaactattaagttttcctttagcccagaacttccattttcctgctgtcttgtctctttaaacagctgactcagctctagctcggctaagtgtggagctctctgctggggagatccctcgaaggagacattgtgaggctagagaactggtttcaaattcagctctgccatgaaatccctgaccaacatcctcagtcttccatctataaaatgagggacttggcatctccaatcacttcttgttcaattcacttctaagccctatacatcttaacctgtaatactccctcgatccctacttcccacagtgctccatcctccaaaggttggaagagtcattccatctacagatacctcctggccctgccttcccccttcagaacctgtgccaaattgtgcagatgtacgagggacattcccagcagcctgctctgcaacccagattgctgagatggagctctcagactttaaggactgcctgacactatttgcaggagacccaggacttgggcctgaggaaccacgggcagccatgggcaaagcaaaatgggtcagggacggagagccaactgaggttggccatgaggaagctgtgtgggtgtgatgtaggacacgaagagaatagagagttggatgagaggtgggggaagcagaagataaaagagttagaagatttgggtcacaagtagaaggtgaggagagataaatattgaggaaagagagctactataatgaatagagggactaaagcagtgattaccaaattttaatgcatatcacaatcatcaagggaacagatttttttcttttttctttttttttctttcttaaaaaataatggcatacttcatgaatttgtgtgttatccttgcgcaggcgccatgctaatctctgtatcattccaatttttttttgtatatgtgctgctgaaccgagcacgggaacagtgccaatgctggattaccatgctagactgacttaataaaaacctttgcggaggctggacggagtggctcgtgcctgtaatcacagcactttgggaggctgaggcaggtggattgcttgagcccaggagtttgagaccagactgggcaacatggtgaagccctgtctctactaaaaatagaaaaaaaattagctgggtgtggcggcacatgcctgtaatcccagctactcaggaggctggggtaggagaatcccctgagcgcaggaggtggagggtgcaatgagccaagatcacaccactgcactccagcctgggtgtcagagcaagaccctgtctcataaattaaaaaataagcctctgggagaaagtctagacatctgcatctgcttttttttttttttttttttttgagacacagtctcactctgtcacccagcatccaggctggagtgcggtggtgtgatcttggctcactgtaacctctacatcctgggctcaaacgatcctcctgcctcagcctctcgagaagctgggactacaggtgcacaccactacacctggctaatttttgtatttttggtagagatgaggtttcgctgtgttgcccaggatggtcttgaactcctgggctcaagcattcctcccacctcagcctcccaaagtgctgggattacagctgtgagccactgtgctgggccccaggcatctgcattttaataagcgtctctgtgtctgatgcacataaaagtgtggaactcatggactagagttagtttgctcttcttttccactgattgtaatgtctttcaaaacaccttagaggaactgtaaggcaacggtctcattttatagtggaggaaaccaaagaaaaggcaagtgacttgcctagagttatacagctaaggtcagaggcaagacttaaaacccagcattctgactcccaatctactggttttccactcacattgttcctctctttctcctagttgtggggtcccccccggggatttggtcctgagcagatcctgcagctcggtagactcttaataggtctgggagatcaggaactacaggagctgatcctagtggactggggagtgctgagcaccctggggcagatagatggctggagctccactcaggtaacacttttactcctccctaccgcttcccaaacacccatcccacagacccagccctatagatcatctaaagcccaaggaattttttcctgtgaccctacctggtcattctttctgtcttttgttaatatcccatactagtgaccttcaggactcttgatttattcactctgaggccctggacacataatactgtctcctacctcttttcctggaggcttcctctttttctttccttttcttttctgagtcctcagccttccccatgactccttaggtcttaatagtaacagaatataacccagtaacacctatcacttccctgtccattaattctccataactttcctccttcccctcttctcccaccccccaccccagctccgcattgtggtctccagtttcctacggcagagtggtcggcatgtgagccacctggacttcgttcatctgacagcgctgggttatactctctgtggactgcggccagaggagctccagcacatcagcagttgggagtttaggtcatttgtgaaggggctgagggtggtcgtgttcaggtaaaggtggacttgctggggaaaggaggatcatgaagttatagtcccatggaggaagggaactcatttgaagccatctcttcctttgtctcatgaccacagtccctttcactgaagccgaattcttcttccttccttcccactgttctacagccaagcagctctcttcctgggcaccctgcatctgcagtgctctgaggaacaactggagtttctggcccacctctttgtactgcctggtgggtttggcccaatcagtaactgggggcctgagatcttcactgaaattggcaccatagcaggtggggagctgggccactgctggtgcaagttggtttggtttctataccatgggtggactggatggaagactgccctgcaattcttcaggtgtgggcctgagagggtgtttaaataaggggctagagacatattggggaaggtctatgatagggcactttgggagtagttagagaaggtctataggtttgaagagagggaaggtcagtctaagacaatgtttggatgccacttgcttcaacagctgggatcccagacctggctctttcagcactgctgcggggacagatccagggcgttactcctcttgccatttctgtcatccctcctcctaaatttgctgtaagtattaatggactggggtgaccacaggagagccagggcccaatggggactacatgcatgcactgattcctacccctgccctcaggtggtgtttagtcccatccaactatctagtctcgccagtgctcaggctgtggctgtcactcctgagcaaatggcctttctgagtcctgagcagcgacgagcagttgcatgggcccaacatgagggaaaggagagcccagaacagcaaggtgagttcccagctgcacagcttgatcctccatctcctgacccagaatcaaacccctaatttggtgctgtctggctcttagagtgcacccagggagatccctggagtgaaggagtctacaggcagagcgctaatttccaagtatcaatgctcctggagagctgagttgtgatattactcccattccctgtctattataggtcgaagtacagcctggggcctccaggactggtcacgaccttcctggtccctggtattgactatcagcttccttggccacctgctatgagcctgtctctacagtagaaggagattgtggggagagaaatcttaagtcataatgaataaagtgcaaacagaagtgcatcctgattattttcagaagctgatgaggaata

SEQ ID NO: 39 - protein, 245 aa, Homo sapiens
MPSQQKKIIFCMAGVFSFACALGVVTALGTPLWIKATVLCKTGALLVNASGQELDKFMGEMQYGLFHGEGVRQCGLGARPFRFSFFPDLLKAIPVSIHVNVILFSAILIVLTMVGTAFFMYNAFGKPFETLHGPLGLYLLSFISVALWLPATRHQAQGSCGCLVMILFASEVKIHHLSEKIANYKEGTYVYKTQSEKYTTSFWVIFFCFFVHFLNGLLIRLAGFQFPFAKSKDAETTNVAADLMY

SEQ ID NO: 40 - DNA, 738 bp, Homo sapiens
atgccaagccaacagaagaaaatcattttttgcatggccggagtgttcagttttgcatgtgccctcggagttgtgacagccttggggacaccgttgtggatcaaagccactgtcctctgcaaaacgggagctctgctcgtcaatgcctcagggcaggagctggacaagtttatgggtgaaatgcagtacgggcttttccacggagagggtgtgaggcagtgtgggttgggagcaaggccctttcggttctcattttttccagatttgctcaaagcaatcccagtgagcatccacgtcaatgtcattctcttctctgccatccttattgtgttaaccatggtggggacagccttcttcatgtacaatgcttttggaaaaccttttgaaactctgcatggtcccctagggctgtaccttttgagcttcatttcagttgccctttggctgccagctaccaggcaccaggctcaaggctcctgtggctgtcttgtcatgatattgtttgcctctgaagtgaaaatccatcacctctcagaaaaaattgcaaattataaagaagggacttatgtctacaaaacgcaaagtgaaaaatataccacctcattctgggtcattttcttttgcttttttgttcattttctgaatgggctcctaatacgacttgctggatttcagttcccttttgcaaaatctaaagacgcagaaacaactaatgtagctgcagatctaatgtactga

SEQ ID NO: 41 - protein, 232 aa, Homo sapiens
MPSQQKKIIFCMAGVFSFACALGVVTALGTPLWIKATVLCKTGALLVNASGQELDKFMGEMQYGLFHGEGVRQCGLGARPFRFSFFPDLLKAIPVSIHVNVILFSAILIVLTMVGTAFFMYNAFGKPFETLHGPLGLYLLSFISGSCGCLVMILFASEVKIHHLSEKIANYKEGTYVYKTQSEKYTTSFWVIFFCFFVHFLNGLLIRLAGFQFPFAKSKDAETTNVAADLMY

SEQ ID NO: 42 - DNA, 699 bp, Homo sapiens
atgccaagccaacagaagaaaatcattttttgcatggccggagtgttcagttttgcatgtgccctcggagttgtgacagccttggggacaccgttgtggatcaaagccactgtcctctgcaaaacgggagctctgctcgtcaatgcctcagggcaggagctggacaagtttatgggtgaaatgcagtacgggcttttccacggagagggtgtgaggcagtgtgggttgggagcaaggccctttcggttctcattttttccagatttgctcaaagcaatcccagtgagcatccacgtcaatgtcattctcttctctgccatccttattgtgttaaccatggtggggacagccttcttcatgtacaatgcttttggaaaaccttttgaaactctgcatggtcccctagggctgtaccttttgagcttcatttcaggctcctgtggctgtcttgtcatgatattgtttgcctctgaagtgaaaatccatcacctctcagaaaaaattgcaaattataaagaagggacttatgtctacaaaacgcaaagtgaaaaatataccacctcattctgggtcattttcttttgcttttttgttcattttctgaatgggctcctaatacgacttgctggatttcagttcccttttgcaaaatctaaagacgcagaaacaactaatgtagctgcagatctaatgtactga

SEQ ID NO: 43 - protein, 120 aa, Homo sapiens
MQALQQQPVFPDLLKAIPVSIHVNVILFSAILIVLTMVGTAFFMYNAFGKPFETLHGPLGLYLLSFISGSCGCLVMILFASEVKIHHLSEKIANYKEGTYVYKTQSEKYTTSFWLTKGHS

SEQ ID NO: 44 - DNA, 363 bp, Homo sapiens
atgcaggccctgcagcagcaaccagtttttccagatttgctcaaagcaatcccagtgagcatccacgtcaatgtcattctcttctctgccatccttattgtgttaaccatggtggggacagccttcttcatgtacaatgcttttggaaaaccttttgaaactctgcatggtcccctagggctgtaccttttgagcttcatttcaggctcctgtggctgtcttgtcatgatattgtttgcctctgaagtgaaaatccatcacctctcagaaaaaattgcaaattataaagaagggacttatgtctacaaaacgcaaagtgaaaaatataccacctcattctggctgactaaaggccacagctga

SEQ ID NO: 45 - protein, 185 aa, Homo sapiens
MPSQQKKIIFCMAGVFSFACALGVVTALGTPLWIKATVLCKTGALLVNASGQELDKFMGEMQYGLFHGEGVRQCGLGARPFRFSCYFLDPFMGLPTGVPHLLSLPCSTSCRREHTSERVQEPAGCFSAVRSKLHAGPAAATSFSRFAQSNPSEHPRQCHSLLCHPYCVNHGGDSLLHVQCFWKTF

SEQ ID NO: 46 - DNA, 558 bp, Homo sapiens
atgccaagccaacagaagaaaatcattttttgcatggccggagtgttcagttttgcatgtgccctcggagttgtgacagccttggggacaccgttgtggatcaaagccactgtcctctgcaaaacgggagctctgctcgtcaatgcctcagggcaggagctggacaagtttatgggtgaaatgcagtacgggcttttccacggagagggtgtgaggcagtgtgggttgggagcaaggccctttcggttctcatgctattttcttgaccccttcatgggactcccaacaggggtaccccatttactcagcctgccctgctcaacctcttgcaggagggagcacacgagtgaacgagtgcaggaaccagctggctgctttagtgctgtgaggagtaaactccatgcaggccctgcagcagcaaccagtttttccagatttgctcaaagcaatcccagtgagcatccacgtcaatgtcattctcttctctgccatccttattgtgttaaccatggtggggacagccttcttcatgtacaatgcttttggaaaaccttttga

SEQ ID NO: 47 - DNA, 46837 bp, Homo sapiens
aggagatacttgaaggcagtttgaaagacttgttttacagattcttagtccaaagatttccaattagggagaagaagcagcagaaaaggagaaaagccaagtatgagtgatgatgaggccttcatctactgacatttaacctggcgagaaccgtcgatggtgaagttgccttttcagctgggagctgtccgttcagcttccgtaataaatgcagtcaaagaggcagtcccttcccattgctcacaaaggtcttgtttttgaacctcgccctcacagaagccgtttctcatcatgccaagccaacagaagaaaatcattttttgcatggccggagtgttcagttttgcatgtgccctcggagttgtgacagccttggggacaccgttgtggatcaaagccactgtcctctgcaaaacgggagctctgctcgtcaatgcctcagggcaggagctggacaagtttatgggtgaaatgcagtacgggcttttccacggagagggtgtgaggcagtgtgggttgggagcaaggccctttcggttctcatgtaagtagcaattgcatttgagttatttaatgctttaggcagactcttcccagtgttgcgaggaattatatttgagaattttgccgtgtttactgcaggactttttaaatcggtgtgaaccatatgaaaaacctatgactctgagcaatttcttcttcctagtttttattattttatacttgctttttattataatatagagttaattcattgttacataattaaggtttttggaaatattggcaattaagatgcttaagtattaatatttatgtaaaaaattatggagtctttttaaaaaagtaaacttggggaaataggaaagctgtaaagaatgatctttatgctttttgttctttataaaaagaaccaaggtcatgggctccgtatttaaccaggttgccacctttctcatgattttgtttcctgctccccactccctcccattattcctgctaagacctttcctgctgctaaatattcagttttcatttttaactaatttggaatcatttggctatagaaatttaaaatgatctgctgtgctaactgggaaagaaatggatgcctatttagtatagaacattttaaactgattgacctgcaaatcatgtagagaatatgagagagattttcttgttgtgatttttgtgaaatggaagtgtaatccacagtatttataacctgtttatcttaagaagagaatttttaaaaattaccatgtgaataggcaactcattaaatgaaaattaataggaagtcatttgttatatctcttacaacacacattcagaagttattattatttcagaagggctggtttggaacaaccttatgaagacacagtcagtaaattactgcataaatcactcttcaggaaaggaggttaccaactgaagcatttaaaatgaattattattttgcccaggttttttttttctttctagtataggtagaaggctaaattaattgaatttattattaacatatgcagtgcctaattaaatttcagtgctggtctatttatatttctgcaacattccttatatcttcttagcagtcattggacaccaaccttcagctcacataggttactaagtgatatgaattttcatagggctccagaaaatttccaagaattggttgttagctttttaattgatgaagtggataccagttcttttcactgaatggcttttattcattaaggtaatggggctgttagagttgcttagttttcctggggaaggggaaggaagaaaacaaagcagaatgtcatgtgatatgcaactgtattaaaaaaccgaaaaggaaaaaagttgagagagatgatttaaccgtgagtcaccggcagccaaagcgtgagtaaagcttctcacagatgaatttagacaaaagcggagaaggtactggtgaattttctggagcctttacattttctacagtgaaatggagataaactttactcatgccataggacatgtttcaaaacaataataagatgttttctgaacacttactacatactaagcactttatatgctttgtctcatttaatccttacacagccacattcttctggggtttagcgaatgatttttgtggttgtgtcctatgcttgtcctgtctaaggatgaagttgttctaattgggtgcccctccttttgctttctgtgaggacttgcagaactggtggggtttaaacagtaccctcacttatctcacagaatttcattagctcccagatacccctgacattctccccctagcctagtgaagaaaatcttccatttacttgttcattctgcagtgacagctccatcaatatacaatagactatacatattaagtgtactgtatatactatacatgttaaaaatctcattcattttggtgaggcccagctaagaatacttacagtagagcttttttttttttcctaagcataaaagtatctttttcaatgcagcatgagacagagttgggaaaaccaaaataaatagatccaatggactccccaaagaggataatattcatttaaataaacacccctctcagtgttaaaactttctaatcaacatgcctttgggacacattgcaccctcaaagtttacactcccattgcaacgcagctttgtggttcacgttttttccattcagaatgtcattaccctgtcaatgatgtttcatcaacgtttgcttggatgagaatcctctgatattcttcctgatagaaatgtataagccctgttcatataaatgaataaaagatctaaccttactttctcagtagtggcttccttggagcaaaaagcagggacctccagagagctcaggtggatgactcttttctgtttcttccagagctcaacttacaattagtgcacaattcatttcccagaatgtcttctttcttattgtgcctttagaaagttattaagcaaacatttgaattcacagaatcttaccagtgtaagaggaatggaaaaggtaacttatcaaggtaacaatcacttcgtggccagttttttcggctcactgcaactacccctcctgggttcaagcgattctcctgcctcagcctcccaagtagctgggactacaggcgtgcaccaccatgcccagctaattttttttttgtatttttagtaaagacagggtttcaccatgtgggccaggctggtctcatggcaagttttctttgtgttgtcatgttattatcaattaataggaatttatatttcagttctgttaggtggataaacactattttgcatacctaaatgtttcatttatatcagcactggccaataaaaatatactataagcaggccgggtgcagtggctcacgcctgtaatcccaacttttgggaggccaacactttgggaggacacagggtcaggagatcgagaccatcctggctaacctggtgaaatcccgtctctactaaaaatacaaaaaattagccgggcgtggcgggggcgcctgtagtcccagctacttgggaggctgaggcaggagaatggcacgaacccgggaggtggagcttgcagtgagccgagatctcgccactgcactccagccttggtgacagagcaagactctgtctcaaaaaaaaaaaaaaaaaaaaaaaaaaaaaaatatatatatatatatatatattacaagccacaagccacatatgtacttttaaatgtcctagtagccatattagaaaacaaaagtaaaaaggaatagatgaaattaattttaatgatttttttaaacccaagatatccaaaatattatcattttaacatataattaaaaatttattgagatgttttacattgtttttttttttcttgacgctgtcttggaaatctagagtgtattttacatttacattacatctaattcagtctagccacatttcacatgctcatttttttgtgtgtggttttatggagcagagagtttaataggcaagaaagaaaagagaaggcagaagaaaatggctcccctgtacagagacgcgggggtggggcgctccaaagccaaaagaggaggtccctaagtatggtagacaccagccaggaatatatgcagtgtctggaggaggggatgtctgatttgcatagggtcacatgctcatttttatggctactgtattggtcagtacagatttagatggggatttgctctgaacaagttggtgattgatggtgttcatattttaattgaatttttcctgggttctgctgtacacttgtatgtgtgttagtttcatgtgcaatgcttgtgtcacttttaaaacccagatatatggcataacatgagaatgaaaaatggaccagaaaaatagtttggcaatgtagtcatgtttgttcctattaaatgttccctattgaccactctatctcttttaattataacaagaatctgccctgccagcatgcccagttacgctgggaaaacttctgcctcatttactctggctgattctcatccacttatgggtcagtggttcattttctagaggtcaccagcattcatacctagcatacaatttcattcattataatgaaggaatgttttcccttcaaagagacacaactagtgggcttaatttttcttgatatgtcacctgtaaaattttaatgatgatgtttaaactctaaatgtagccatcaagacaaaaactgcaaattttgagcctcagtgtgtgtgggtgggtttctgtttcggtaatttgaaacattgcagaatatcatcaaaatatgatacccaagaatcatatggtatcaatcattcctagatatactgatctattcattgccaagatagttcaatgagctggcaaaaacatatggaattattttcttaaaatgtgaaaaataaaatttaaccaatcatgtatcacagcttgcaactttagtcatactttgaaaagcattttaatttggacctcatgattgaaaatttataaaaagctgaacagaaattagttcacttcatattttagaaaagcagagtttctttactaaatgaggcatttgacccaaattggagagaaaatgttgaaactacttctgtgagcaagcaggtggcttctcaaacacatgttgggatgaaatggttgggcctcagggtctcagtgcctgtcactgagagttggcactctctatctccatggtctcctccaagtgtgactcttgtctcttgctgacctgacctgccccaagtgactcactggtcatgaccctgcacaccttgcgtctctcctatcaccctgccgatggcagagctacaaaggtctttgatgtagctctgtctgatatcctgtgtttccccctatggtctgtgtggaagcaggtatgggggtgtgtaaaggggaagcctatgaagttcatctgcaaagactacctggttaggggaggagaggaagaagctatatgcaccatttcaccagcaagcatgggctcttctgccttttagcttaggggtcctgttgtctagtctcactcacctattaaaacagtccagcaaatagaggttttgtttacctcccattaaaaaaaaagcaattaatggaatagaagataataatgtatgagaagcactattgtgaaagaaaaaccttcaacttctctcagccaaataattgcttcctcctctgtccttcccagaccttgatgtttgctctattatttcaaaacaactatattataaatatttgagaatgtgtatttccctgcaaggagatcttaatccccaagaaggcaggagctgtgtattattcatcccagtgctccttcaaaccagggcctcagacagtgcatggcccaaagaggtacttaataaacgtttggtaaactgacactattgaaattaagcaacctggatttgaggtgggtctctgccactcacaagagattacgctttgagaaaattccatcacttcattgattttcagttcttgcatctgtatatgggagacgatactaggtgatttctgacatctctcaccgtttaaatgctctgtgatctatacaacgaggggctcgctgttctagacaagttccttccagctttacagttgcataacccttctaatcttagtcacatgatgactccactgacagatttttggccaccatcattagacatgctgagttacgtgtgcctttgctctgatcctcaaaactcatgatttttaaagttttctgaaatatctaccatttatcaggatccagatggatttcatgaccaaagtggatgtttcttttctctcccattacaatcttttactttttgtgtgggaaattgcatgttaaagaaagggaaattgaagaatgggatgctttggaattctggcaagatggattagtgggttccagaaagtaggggcagccacaaataccgaaataaatgagatcgtattattgagaaagcacaaatggaagaaggtcaaaagcaagaagaagctgacatcctgcttcctccaatttttgctttctctgtttttccaagaaactcctcttccaagccttgctgaaaaactccactttcctaaatctaacttcttaaactgataatggcaagaagttaggaatgaccaatatgtttaacactccaagagtatttgttttgttttgttttgagactgggtctcactctgtcgtccagcctggagtgcagtggtgtgatcacagctcactgcagccttgacctctcctgcccaaggaatcctcccacctcagcctcctgagtagaagggaccacaggcatgtgccactacacctggctaacttttaaaaaatttttttgtagagatggggttgcccaggcaggtctcaaactgctgggctcaagcaatcctcctgcattggcctcccaaagtgctggaattatgggcataagccactacgcctgacctctccaagggcattctttacccagaagaggaacttggcagaacttatcctccaattggtgaggaatatggagaaaatgactttaagcaaaggaacttctggttctgcctacctaatccagaaaaagaagttttatttctcccttcccctagtaactatcttcccatattcacataaaaaagtacagaatcaacattgttcaagaattataattttacttgtaagcacatgtgcacacgcacacccatataccttccttccctttaaatcatcccacaccctaatagtagtaaaatcattgacccgagcatacctgggagaggaagaggagtctgacaggggcaggttctaagtggcactcctggaacttaaccctggtgtatatgaactttacctattgaaggatgactcctcaactgttctcacaatttgctgctctgctttcttttctaatttctgaaggtgactcatcttccccaaggactttcagacttctcagaagaaaaaaatattgggtgggtctctgccactggcaaaagattagactttgagaatcataaaagtatatcagtatatactcattaatattgaattactataattaatattatgatattgatataatgatagaatgatattgataaaagcaatattcaataatgaatattatttcagctgcccacttattgggtgcctcataggtgccaggcattttgtatgtattatctacaacccttacatgggacatattatgatgctgtttctcttgaagaaatatggaaactggaaacagagaggtcaccacaattttccaaagtcacatagctaataggtagcagacttgggattcaaattcatatgcatatggtaaatcatgctcttcctctgctacattttgcccccttagaatatgaaaaagggatacaaagagatgaagaaaatatgtaagattatccttcaatttcactatcttttttaaagttttttttattatactttaaattctgaaatacatgtgcagaacatgcaggtttgttacataggtatacacgtgccatgatggtttgttgcacccatcaacctgtcatctacattaggtatttttcctaatgctatccctcccctagtcccccacccaccgacaagccccggtgtgtgatattcccctccctgtgtccatgtgttctcattgttcaactcccacttatgagtgagaacatgcggtgtttggttttctgttcctgcgtcagtttgctgagaatgatggtttccagcttcattcatgttcctgcaaaaggcatgaactcattttatggctgcataccattctatggtatacatgtgccacattttcttaatctagtctatcattgatgggcatttggcttagttccaagtccttgctattgtgaacagtgctgcaataaacatatgtgggcatatgtctttatagtagaatgatttataatcctttgggtatagacccagtaatgggattgctgggtcaaatggcatttctggttctaggtccttcaggaattgccacactgtcttccacaatagctgaactagtttacactcccaccaacagtgtaaaagcgttcctatttctccacatcctctccaacatctgttgcttcctgactttttaatgattgccattctaattggagtgagatggtatctcagtgtggttttgattagcatttctttaatgacaagtgatgatgagctttttttcatgtttgttggccgtataaatgtcttcttttgagaagtgtccgttcatatcctttgcccactttttaacggggttttttcttgtaaatttgtttaacttccttgtagattctggatattagtcctttgtcagatgggtagattgcaaaaattttcttccattctgcaggttgcccgttcactctgataatagtttcttttgctgcgcagaagtttttttagtttaattagatcccatttgtcaattttggcttttgttgccattgcttttggtgtttagtcatgaagtctttgcccacgcctatgtcctgaatggtaatgcctaggttttcttctaggatttttatggttttaggtcttatgtttaaatctttaatccatcttgagttaatttttgtataaggtataaggaaggggtccagtttagttttctgcatatggctagccagttttcccaacaccatttattaaatagggaatcctttccccgttgcttgtttttgtcaggtttgtcaaagagcagatggttgtagatgtgtggcattatttctgaggcctctgttctgtttcattggtctctgtatctgttttgatacaagtaccatgctgttttggttactgtagacttgtagtataatttgaagtcaggtagcgtaatacctccagttttgttctttttgcttaggattgtcttgactattcaggctcttttttggttccatatgaaatttaaagtagttttttctaattctgtgaagaaagtcaatggtagcttgatgggaaaagcattgaatctataagttactttgggcagtatggccattttcatgatattaattcttcctatccgtgagcatggaatgtttttccatttgtttgtgtcctttcttatttccttgagcagtagtttgtagttctccttgaagaggtccatcacatcccttgtaagttgtattcctaggtattttgttctctttgtagcaattgtgaatggaagttcactcataagtttgctctctgtttgtctgttattggtgtataggaatgcttgtgatttttgcacattgattttgtatcctgagactttgccgaagttgcttatcagcttaaggagattttgggctgagacgacagggttttctaaatatacaatcatctcatctgcaaacagagacaatttgacttcctctcttcctatttgaatacgctttatttctttctcttgcctgtttgccctggccagaacttccaatactgtgttgaataggagtgttcaccacctattttaagaatagtattgaagcctcacaaaagctggttctcatgtaaccatctgagaatatttggccttatgacttgaattcattcattgcctttttatttcacattttagtgatcctgatgtctaaatcttaatctttgatccttgcaaggtaaaatagccaagtcaagcctgtttaataatattggttgaggaagtcacatgcttatgatcaatctttgggttatgtaattatattaccttaatgttggcagtttaggtgtaaggcagagatatctgatcacatgtgtggttagctaatttaagatcactgccaactaaaatcttcatggtatgatcttcaaagttagctactttgaccacagcaatgatttcaccacagcaattaacaaaatggcagactctttcctgaggtggcatgaacagttttaaaacaaagtcaaggaccaaaagaaaagcaggcacatggcatttgattcatttcaaaaactagtattgtattaagagccaaggggatagaattgtagcatcaattaaaatcttgtttgaaaaaaaataaaaacaaacgtccatttttatctctcaaatatattagggttttcataaagttataggtgtatttttaaaaaaacaaaactcatatacattagactgaaaaatttgcctgtcatctcatcatgcagctaaatgcaattgtctatggcgagatacactcttattagaggtatgatagcactaactaatagcaaactttgtacctggtagtctaatttatgcagggttcatatttcgctccctctcagcatgctgtaactgtggcaaagccattctcaggagttattaccccaacataatcatacccctgtggattaggagcagttaaatgggtcctgttatcagagacacatatgtgccacagccgctgtcatccctaagccaccgtgggtgattaagactcactgatgggactacctctgaataggcttgagtgaggtggatacacttcagctgagagaaattcaggtaaggggctgagaaaatcagattttgaatggttttatcataccatcaggtctccttttaagtgctggggtcatggatttcattcaacctgaccacatagcctttggaagcttggctcaatacctgagtgtgagattatgggtgatattaaaggagatgaatgcattgagctgatgtcagagaatgtcttttactggattttcataatgactggctgcagatgggctgaggggaaagtcagatcaagagcatttctgtaagaagaaagaaatcttccctcttattctctttcaagaaaatgaatagctgagcaccaagaggccaaatacttttttaaaaaacacatccttttatgtagagaaggacaggttgagacgaaaaacaggacctctgaaactgtctttatagctttaatctaggaagaaattgcggcaccattgctgacatcattatcagaggctgccttagttctgagagcttcacagatggccttttctgcattttacatctggccagatgaaggcaaaaaggttgatgaaaccaaaactattagatcagtggtccataactctggctgcactttagaatcatctggggagtccttaaaactactgatcctgaggctccatcccagaccaattgaatcaggatctctgggggtgggacctgagcattggaatgctttaaaagttcctcagggactctaatgtgcagccaaggctgagaatgactgaggtggatggtggccaagacaggtgaggccaagagttagaagcccttactgttagggaaggcagaagccacaaggaggaggggagggggaaggagcagtatttagcatttcttccacacagttggggggttttctgatcaaaattaggctgggatctttcgcttccattttcatgaaggtcttatgctttgtccacagccacctggcctcagggcaatgagcaatctgattgatgaattttcagtaagaaactgagcacacttggctctcagccccagtggcttcccctgtttccaaatctgcccaccagttacaggagcctgctcaccaactggttgggttaaagaagtcggctctgtccttggcagggaggccttcagctgtctggccctgtctgtgactgcgtgggtgaagctgcctaatttggggaacttgatggaagatctaagctatgttctctaacagttttatcagaaataaagttaacttttgacctccatctgcctgtctcctgtggaagggctctgctccttccaaagagactctcaggggttctccttagaggtgtgttatcagtccaaagatcattttagaccagccattacagaggatgtccaagaaattgcacaagggaaatagaagtaagaatgagagcaatatatcagatagtaaggaaagtatgtgactggtttcaaataagtaattaaccataaatccaaagttcctgcattagttatagcaatagtcatccacctggtcaggaaaaaaaaagtaaaagactgagctgcaagatagaaagtttgcctgaattccacgtacttcaaggactactatggaggattccttggtcccaatgcagagacatgtactctgaccacccatgggccaaatccctcttacccaccctcagtgattcctcctgggacctcactacattgagttcttacattccccactcttttcgggggaaatataacccttctgctcttctcatgatgttaaaaatatttagacaattacttaaaatttacaacaatcttccacataaatgatctcacttatgtttcttgtgagctctgtgatttatttctattatcatctatgctgatagttaaggaaactgagatatcgagaccaacatgcatagtaaatggcaaaaccagatgaattttaaactttcctaactccaaaagccacatcctgcccaacccgccatgctgccgctcagttaatgcctggctgtttgtctccccattggcccctctacccattgtgctttgatggcacactgtattccaactgcctgagactcctggttaatgccattacgtacagacttaggttgaatttactaggatttttaagatttgtaggataagagatatgactgttagactggaatcagcaatagataaaaggttaacaaagtttcagaataaaatataatagaaaaccccagcagatagaagtaaaatgaatggtaagacaactgaaatgaaagccatacatttagaaatatcaaataaaacacagattaatggcagacaataaaggaacatacttagcagttagtaaaaacactttttaccttattcttattaccctccagtaaccttttttttttttttttttgagacaaagtctcgctgtgtcgtccaggctggagggtagtgatgtgatctcggctcactgcaacttctgcctcttgggctgaagagattctcctgccccagcctcctgagtagctgggactataggggcccatcactgcacctggctaatttttgtatttttagtagagacggggtttcaccatgttggccaggctggtcttgaactcctggcctcaggtgatccacccgcctcagcctcccaaagtgctgagattacaagcgtgagccaccaagcccggctgtaacctattgaaaataacattacttgacatgtgagacaaattatttgtaagttaaagagtttatgtgccttcaatgctcccacccttccctcccctaaaaagattattgagtgcccatgatgtgcctaagccttctggtagactctgagaatgtgaagagagttagaggatacttgttcaacaacccagaatctagcagaagtgttttgaaatgaccagccacttgggagagctatgctagcatatcattcaggatgggctgggtcatgttttaataacaagtaagtttgaactttataggtttgaaacaaaaaagatgtgtttcttgctcacagttcatattttttggagattggctggagcttcattccaggatactgccaccatctggaatgttgacagttaccgtaacagagaaagagttgtggaggctgtcacactggcaattaaattcgctgacctggaactgacacatgccacctccacttatattttattggccaaggcttgttacacagccacatctaacttcagagaggtcaagatgagcaaatcctaccacgagctatagatggatgagtagcactcattattatcacaattattttatttgttataaaaactccaagaaggagaggtactctatgtgaggaataggcataggaaaatcagagggaagttcttaaagatgagctagatttcactagatggcattgaagaaacattccaagtaaatgaacagcataagcaaatgcatgaagaacttattgtggtcctagtacagacgatgcgtgagagtgtggaggagggaaaaggtaagactggagaggaaggcaggaaccagaacaggacagactgtgttcactgtcaggcagttaagtctatcttgtaggcaacatgaagccttttaaggaaggcaagcagctatgtgacaggacagaagatggattggaagaaaatcaaaagagaagtggggaccagtcataaggctcctccaatatttggggatccaaaccaaagcactggcagagaaatagaaaggaagggaaatatttccaaaatattcaaaacagaaaccaagagaacttgatgacagaagatgaacccaggtttctactgaatggacagttgttacattctctgagataaggaatacagaaggaaaaagttgagagggaatatgaaattatttttaatcatgtttaatttgatcacttgtggaacatcaaccagagatgtccatcagttacaccaatttgtaggttttgagagaggcctgaggtagaggcagagaagtgggaatcagcagattagcggcagtagttggaaccataactgaagatgagatttcccagggaggggagttgaacaggaaggtagacaaaggctgagtgcagtggctcatacctgtaatcccagcactttgggaggctgcagtgggtagatcacaaacaagatcaggagttcaagaccagcctggccaacatggtgaaaccccgtctctactaaaaaaacacaaaaattagccgggcgtggtggcacacacttgtaatcccagcctcaggaggctgaggcaggagaattgcttgaacccgggaggcagaggttgcagtgagccaagatcgtgccattgcactccagcctgggcgacagagcgagactccgtccccaccgaccccctaaaaaagaaagtagacaaagatgtgtcctagaaaacactaatatgaatgggtagagaggggagacttgtcaaggagatcgaggggagagtcagtgaggtgaaaccttagaggatagaccttcaccaaggaagtaacagtcaacaggcctaaatgccacagagatgtcaaatgagagacactggaaatggttctttgaatattacagccagaacatcacaggagaccatttccaaagcagtcttgatgaagtggtggggaagggaggtccctgaaggagctaaggagggactgggagatcatgacccagagataagtgttgcaggtataaaagggaaagactgagatcaggaaatagccacaggatccctaaggccaggcttcgggtggggtggtgtgtgtgtgtgtgtgtgtgtgtgtgtgtgtgtataaaatgggaagaccttgagtataattctgtactaagaagatagagcagtagagaggaaaaggctgaagacagatgggagggtaaatagtgaattagaaaggtctgtgcaaagatgagaaaggatgagtctgaaagcacagggagaagggccagccttggacaggagaaaacatttctttcactaagaataaagggaaggttgggtatacaccacaaagaaggtgtagatgggtggcaatggagttctgtcaagttgagggcattccatgatagcctcacctttctctgtgaaatgagagagtttagtttacaagatatttctgagcacttcataagccaggttcatagactgaaagaagtggaggtggagtgtgataggtccttaagaataggggaagtttggaatatctgacaagggacagagaggaaaaaactagaaaaggctttgcagaatgtgggcccacagatcagaggctaaggggtccccatttgtgcaggagagtaagggcagggaggcaaggctcacagcccaaaatatagagcccctcaccaaatgactgcaggagggcagctttcctatgagagcatccctatcactgttttcactccgagtcattaacttacgacttactcagctctgtttcgtaatagcagactcgagtaatgagggtatgacagcctctctctgcatgccaaggtatgcagcgtggatttcctttttcgctttctctctcctgtggcttaggtgccttctgttctgctaccaggatagagaacccagtgactagtttcttctagctctctttttctgactaggtatcttgtcagaaatttctgcttaccagacttcatggagagggaatcaagctttgaatcagggttgaaaaagtagagcttaatatatatattacaaaatgccactcacgttcttgaggttaccttgtatctataccacaactagcattcttttagaaagcaccattaccgaagtaatccctttcctgggaattcacccaaaaaggttattcccacttatcccccatctccaaaataaaaaagaaaaatgtgtgtgcttagagatgttcctggaagcatgagctgtaatactgaaccaatagaagacgaactaacagattgcagggcatccgtttggcaaaaaacttatgcagttatctaaatgatagttatgaagacaatatgtataacacattatattctgagtgaaaagaacagaaggtgatttcaaaactgcattgggataatagtaatataggaaatagtgagatgaacaaagatttcaaaggaacaaaaataaagaaaaattttgctttttatattggtaggcgtatgggtgaaattccaattttaattttaatttcatagttataaaattgttcataaaaaaaggtcccccatagacagttgggctttgggacaaactaacagaaacagagtaggaagaaaattcatcttccttcaatcccctttctctgcttaaaacaaaacaaaaaagagctttgtcatgttcaggtgtgcaacgaattctttttccaaatctggaactttacatctgctattaaacaggagtcagtttccatgtaacatgttgacaatcccccaagtgtgttggaataattttttttaatgaggagatttgaaattccatttcaattgccaacctgcctctttcaacttctaaaaacaaagtaaaacaaaacaaaaacacactgggtcctatcaccccctcttgctactactattttatctccattgccctgaattctttccaaacttctttccacccagctttgatttgttttcagtcgggtttattgaggcataatttacgtacagtaaaattcatccttcttagatttagaggtctatgcattttgactaatgcatattggcttataatgactaccacaacaaagatatagaacacacccatcactcccgggttctccctgtcccttttttggtccatctcctctcctacccccaaccccttggcaaccactgatctgttttctgtccttatcattttgctttttccaggatgttgtatataaggaatcatgcagcatgcagcctctcgagtctgacttcttccagttagcacagttatttaagatctatccgagttattgtgagtagcagcatcttttttattgctgactagtatttcatcacatggatgggccacaacttgtttatctgttcacctgtcaatggatactaagttgtttccagtttttggcaaatatgaataaagtaaacatttgcatacagatttttgtgtggacacatgttttcaattctcttaggtaaatactgagcaatgggattgctgggttatatgttaagtctatgttcagttttctaagttctgaaacaattggatatctatatgcaaaaatacaaaattaaccttgactcaaacttgtaccatacacaaaaaataacctgaaagagatcacaggtgtaaatgtaaacctagaactaaaaacttcaaggagagaaacatagcagaaaatatttgtgaccttgcattaggcaaagacttcttagatttgacatttgaaacatgatacataaaaaatcttgataaattggagttcataaaaataagaactactcttcaaaagacactgataagagaatgaaaatacaagccacagacagagaaaatatttgtgaatttcttatctgataaagggtttgtatccagcatgcataaagacttttcaaaactcaataataaacaatccaataagaaatgcacaaaagatacaaacacatcatcgaaaatgacctatgaaaggcaaataagcccacaaaaaaattctcaacatcattagacacttgggaaatgcaaattaaaacaacactgagataaactacatatctattaaatggctaccactttaaaaacctgtcaagtgccagccagaatgtggaacaagtaggactctcttacattgctagtgggaaggtgaatggtacagccactttggaaaacactccgcagcttcttatagttacacataggacctgggggtagaggatggattgactgtaaaggggcaaaacttcctggtaggggtggggaaagtttttagaagggtgaaattgttctatatcttgattattgtggtggttacacaactgtctgcatttgtcaaaactcacagaactgtacactaaaaaggtatatttttatgctctgctaattttactttaatcttaaaaataggaaggaaaaaataaaatcaatgccactgtgcgactttgggcaagttacttcacttctctgtgccttggtcttttgaaatctatacattaaggataaaataataccttcctcatactgttagaattaaatgtgctaatttatgttttatatatataaagtacttggccgggtgtggtgactcacacctgtaatcccagcactgtgggaggccgaggtgggcagatcacttgaggacaggagttcaagactagcctggtcaacatggtgaaaccctgtctctactaaaaatacaaaaattagctgggcttggtggtgcgtgcttgtaatcccagctacttgagtggctgaggtgggaggatcacttgaactccagaggtggaggctgcagtgggctccacccactgcctgggtgacagagctagactccatctcgaagaaaaaataagtacttgaaacatagcaaatgttttataattattggcttttttttcttattgttattacttgcattattgctgtttgaagaagtttggtgataatggagagaaaagggcaattaggggtctgggatggtttaagtatgaggagaccgagacacattgactcagagtgaagaaatcaaagataagagaatgaaagaaagggagggtaattctgaacgcacagacaaagttatgttactaacgtggcatcggctgtgtgttgtaataaataactccctttcacttgtcaatagctaatcaaatactttctggagaccagaagtgacttgctggatcaatgacaactcctccacagatcaaaatgttcaaatcctttttctgtgttgtaatcctaaatctaaaagaacagagagaccaagcaaatctacctcccaacatcattaaagtgacaactctcagtatttatttgaatggtctgctctcagcttcaaccaaggaaaagtcaaattagtgttggtcagaaaacagaagggtgttacgagagttctggctggtcattacagacttggggatttttgattaaaagaagaagaagaagaagaaacctgataaagtgtaaatatagcaagcagggattagtgtcctgctgggtcatgttctcacaacagtgagaatttcagagatttcataagaattaaactgctccacatgacaatttattttaccttctggcttttccaggaggcaaatcagtgcaacttctttctgcctttgtttcaatttggtaacaaccctcaattttaggacaggctaaacctagccaccctatcagagatgatgaagtagccatctttttaacaggtggggagatgaatggaatcagggtttgtttgtttgtttgtttaataactgctagtaaaaaccaagtcaatagctgactgagtgtaagggaggctccagaaggcaggttattgtagtatagatgtgactcgacttatgatgatgttacttcccgataaacccgtcataagttgaaatatcgttaaattgaaaatgcttttaatacaccgaatctaccgaacatcatagcttagctcagcctacgttaaatgtgctcaggacgcacattgcctacagctgagccaaatcacctggcaacacaggacactgtagagtatcggttgctggcccttgtgatgctgtgactgactgggagctgcgcttagtgcctctacccagcattgagagtttcttatcgcttattactagcctgggaaaagaccaaaattcaaaactcaaagtgcggtttctaccgaatgcttataactttcagaccatcatgatgttgaaaaatcgaaccatcgtaggttgggatccatcctataagacgagctacactgccggaagtgtaagactgctatgctgccggaagatggggcatagtggacaactgcaagtcctgacaacaggaggtcagcatctgcgacctttaacatccacattgacactaccacagtcttccaaacagagctgatgatatagtttggatgtcgtccctgcccaaatctcatgtcgaatcgtaatccccagtgttggaggtggggcctggtgggaggtgattgggtcatgggggcagagttcttatgaatggtttagcacggtccccccttggtactgtatagtgagtgagttctcatgcgatctggttgtttaaaagtgtgtggcacctcccctctctctctttctcctactctggccatgtgaagtgttggctcccgctttgccttccaccatgattgttaaattcccagaggtctccctagaagctaatgctgccacgtacagcctggagaactgtgagccaattaaacctcatctctttttaaattacccagtctcaggccgggcgcggtgactgacacctgtaatctcagcactttgggaggctcaggcaggaagatgatttgaggtcaggagttcgagaccagcctggccaacatggtgaaaccccatctctactgaaaatataaaaattagccaggcatggtggcgggtgcctgtaatcccagctacttgggaggctgaggcaggagaatcgcttgaacctgggagtcagaggttgcagagagccaaaatggagccactgtactccagcctgggcaatggagtgagaccctgtctcaaaaaatatatatatattacccagactcaggtatttctttacctgagactatgagagaatggactaatatagctgaagaattttattttatttttaaaaaacttttacgtttgggggtacctgtaaaagtctgttacataggtaaactcctgtcatgaggatttgttgtacagattctttcctgctcctccccctcctcccaccctccatcctcaagaagatcccagtgtctgttgtttccttctttgtgttcgtaagttctcatcatgtagctcccacgtataagtgagaacatgcagtatttggttttctgtccctgtgttagtttgctaaggatgatagcctccaactccatctatcttcctgcaaaagacatgatctcattcatttttattgctgcatagtattccatggtgtatatgtaccacattttctttatccagtctgtcattgatgggcatttaggttgattctgtgtcttcagaattgtgaatagtgctgcaacgaacattcgtgtgcttgtgtctttatagtagaatgatttctattcttctggtagtaatgggattgctgggtcaaatggtcgttctgcttttagctctttgcagaatcaccatactgctttccacagtggttgaactaatttacactcccactaacagtgtataagtgttcccttttctctgcaaccttgccagcctctgttatcttttgactttttaataaaaaccattctaattagtgtgatggtatttcattgttgttttgatttgcatttctctaatgatcagtgatgttgagctttttttcatgttcgttggctgcaggtacatcttcttttgaaaagtgtctgctcatgtcctttgcccactttttaatggggttgtttttctcttgtaaatttaagttcctcatagatgctgggtattagacctttgtcagatgtatagcttgcaaatattttctcccattctgtaggttgtctgcttactcttttgattgtttcttttaccatgcagaagctcctaagtttaattagatcccatttgtcaatttttgcttttgttgcaattgcttttggtgtctttgtcatgaaatctttgccaggtcctatgtccagaatgatattgcctaggttgtcttctagggtttttatagttttgggttttacatttaaatctttaatccatcttgagttgatttttgtgtttggtgtaaggaaggggtccagtttcaatattctgcatatggctagccagttatcccagcattatttattgagtaaggagtatctcctccgttgcttgtttttcccaggtttgttgaagatcagatggttgtaggtgtgtggccttattttggggctctctatcctgttcatttggtctatgtgcctgtttttgtaccagtaccattctgttttggttactgtagccctatagcatatttcaaagttgggtaacatgatgcctccagctttattctttttgcttagaattaccttggccatttgggctctttttggtaccatatgaagtttaaaatagttttttttctagttatgtgaagaatgtcgttggtaatttgataggaataacatgtaatgatattgattcttcctatccatgagcatgggatgtttttccatttgtttgtgtcttctctgatttcttcaagcagtgttttgtaactcatattgtagagattattcacctccttgcttagctgtattcctaggtattgtattctttctgtagtaattgtgaatgggattgcttttctgatttggccctcagcttggtattgttggtgtataggaatgctagtgattttttgtatcctgagactttgctgaagttatttatcagctgaaggagcttttgggctgagactagggggttttttagatatagaatcatgttctctgcaaacagatttagtttgacttcctctcttcctacttggatgccctttatttctttctcttgcctgatttccctggccaggacttccagtaccatgttgaataggcgtggtgagagagggcattcttgtcttgtgccagttttcagggagaatgcttccaccttttgcccattcagtacgatgtttgtggtggtttgtcatatatggctattattattttgaggtgtgttcctttaatacctagtttattgacagtttttaacatgaagcagtgtttaattttattaaaagtcttttctgcctctgttgagatagtcatgtggcttttgtctttagttctgtttatgtgatgaatcacatttgttgatttccttatgttggaccaaccttgcatcccagggatgaagcctacttgattgtggtggtttagctttttgatatactactggattcagtttgcaagtattttgttgaggatttttgcattgatgttcatcacggatatcggcctgaagtttctttttttgttgtgtctctgtcaggttttggtatcagaatgatgctggcctcctagaatgagttggggaggagttcctcctcctcaatttttttggaataggttctgtaggaatggtaccagctcttctttatacatctggtagagtttggctgtgaagccatcaggtcctgggattttttagttggtagggtatttattactgattccctaaatagaccgataatgattttagaagtggagtcggttttttcctggtccagtcttgggaaggtgtatgtatccaggaatttatttagctcttctaggttttctagtttgtgtgcatatgggtgttcatagtagtttctgatggttgtttttatttccgtgggatcagtggtaacattctcttcatcatttcttttttttttttttttttttttttttgagacggagtctcgctctgtcgcccaggctggagtgcagtggcgcgatctcggctcactgcaagctccgcctcccgggttcacgccattctcctgcctcagcctcccgagtagctgggactacaggcgcccgctaccacgtccggctaattttttgtatttttagtagagacggggtttcaccgtgttagccaggatggtctcgatctcctgacctcgtgatccgcccgcctcggcctcccaaagtgctgggattacaggcgtgagccaccgcgcccggcccatttctaattgtgtttatttgaatcctctctcttctcttctttattaggctagctagtggcctatctatcttattaattttttcaaaaaaccagctcctggatttcttgatcttttgaatggtttttcatgtatcaatccttcagttcagctctgattttggttatttcttgtcttgtgctagctttggggttgacttgttcttgcttctctaattctttcagttctgatgttagtttgttagtttgagatctaactttttgatgtggacatttagtgctataaatttaactcttaacactgccttagctgtgtcccagagagtctggtatgttgtatctttgttctcattagtttgaaaaaacttcttgatttctgtcttaatttaattatttatccaaagtcattcaggaacatgttgtttaatttccatgtaattgcatggttttgagcgattttcttagtcttgacttctatttttattgtaccgtggtctgagggtgtttgatatgactttggttcttttgcatttgctgaggattgttttatgtccaattatgtggttgattttagagtatgtgccatgtggtgatgagaagaatgtatattctgttggttttgggtacagagttctgtagaggtctattagatccatttggtccaatgttgagttcagatcctgaatatctttgctaatttcctgcctccatgatctaatactgtcagtaaagcactgaagtctcctactactattgtgtgggagtctatgtctctttataggtctctaagaacttgctttatgaatctgggtgcttctgtgttggatgcatatatatttaggatagttagatcttcttgttgaattgaaccctttaccattatgtaacgcccttctttgtctttttttttctttgttggtttgaagtcttctttgtctgaaattaggattgcaacccctgcttttttctgttttctgtttgcttggtagattttcctccatccctttattttggacctatgggtgtccttacatattttatctttatctatccatccagccatccagccatccattcatccgtatcatttttaaccaataaggacttttaaaagcgcaaccacaacaccattaacataaccaataaaatctataacaatgataaaatatcatctaatactcagtccatgtccaattttccctcgctatctcaaaatcgtcttcttagaaatggtctgttcaaatgagatcacatggacagaggaaggcgaacctcacactgtggggactgttgtggggtggggggaggggggagggatagcattgggagatatacctaatgctagatgacaagttagtgggtgcagcgcaccagcatggcacatgtatatgtatgtaactaacctgcacaatgtgcacatgtaccctaaaacttaaagtataataataaaaaataaaaataaaaaaataaaaagtgaaaaaagaaaaaaaaaaaaaaaagaaatggtctgttcaaatcacaaaccagattcagaaacaatagccatacattacattttattaatatgtctcttaaatttcttttaatctattacagtctttggaatttttatgtcttcgtttatccttccaattattaaaaaaaaagtatttttgtattcattgaatagacaatgcttgcagaaaagtaaaaaaaaaaaaatttagtacaaaaaggtacatagtgagctgttccttagtctcccttcccagaagcaatgttaccacttttgtacaaatagtctctgcctagacacacatgccagtccctaaggtggctgtaacaaggtggttaagagtgagaacatgaattcaaattcctattatgccactcactaagtataaatcttggtcatggtacatgcctctgtgcctcagtttttaataatggtacctacctcatagggctgttgagagaattaaatcagataagtgcttaaataactattaatatttattattattcacattcccttttggcttttttcccaaatagcagagtggtgcacatatgtcttcatttatttggcttgttttttcacctcacatcacattttgatgaataattccatacatgttgttatagatttgcttcattctttgtaatcattgactaatattccattgtatgaatatgctactgctaaacatgtacgttatttccaacctcttattatcaagaaatgctgcaatgaatatccttgtaatactttagtggattcatgtgcaaaaatattcataggataaaatcctgaaagttaaattgctgagctaaagggtatgtgcattttaatgctttatagattgcccagctgcctcaaaggaggttataacaatttacactcccaagaaaaatgcacaagggtccccatttccccataccctagctaacacaggatattgctaaatgctttcatctttgtaaacatgatgtattgaaaatggtatctcaaagttttaatgtgcatttttctgattgtgagaagataaaggaaatgtagtacaactaaacatcagcagtcaaatgacctggccatgactcctgagtgaggacactggtaaacaccatcaggatccaaacacctctgtatttacgaagaggatgctccctattggatagcactaagcttatttcatgtatgtacatatgtagttagttaattacatccagcggtggcaaagggcttgttctgacccaatgaaactttctctcctggcccccttccagcatgtggtcaggagtagagtgttgtggccatgaggcatgcatttgtacagatgactacttactcctccttgaaacatttttttccatttgcttccctgctgtctcactcatgggtctgctcctaattcacaaatcactcttttcccagtcttcttggttgggttttctcctcttctgtgcttgtagacatgggggagccccagggcttctctcttgaactacagcttctccctgggttcatctccttgggatgtctgttccaatgggtttaaatactagggctaggactagggagaggtcattgaggcacttagcacataaagtttaaggaaacattctttatcaggcccatgcaagtgcaggactggccctggagggtgactaccaccttaccttttccaccctaggcaccttgtttgccttaccctagccccagtcctctttaacaccccagtcttctccctggacctccagaaacataaatcctatttgacatttctacttggaggttttaaggtaactcaaacgtaaaatatctaagacagaactcttgcatcacttcccatcctggggcccaagcctgtctcttctactagtctatctcagttaacagcatcaccatttattcagttgctcaggacaaaaaatttgaagtaatccttgactcttctttttttttttttgagacggattctcactctgttgcccaggctggagtgcagtggtgggaccttggctcactgcaacctctgcctcctgggttcaagcaattctcctgcctcagtcttctgacctcgtgatccactcgcctcggcctcccaaagtgctgggattacaggcgtgagccaccgcacccggcctggattcttttttttttttttaaacaagtcctatcttccatctccaaaatgtatcccaaatctgacaacctctcccaccgtaggccagcccccatctctcccctctgaaaatagcctcccttagatctctggacatttgttcttccccacccccttgtgatcactattcagcattcagaatgatcttttaatattatgaaggagactgtgttcctctcctacttaaaattctctagtggcttcctaataaatttagaataaaaagccaactcctcgccatggtcaccaggccaggatccagtgggtacaacaatctgttcccagcacaataatcccacttctgcctccccaccattcaccaggctccactgcactggctcattcctgcctcagttgtgcttcttttccctggaaagttctttctgtagatctttaaagggtgatttccttctcaacattcaggtgtcagctcgtttcactttcctgaccatgcccatccactcagagatcactcaaaatcccattaccctattttatttctccatcatatgtatcactatctgaaactatcttgttgttgatgcaggctattttcttgaccccttcatgggactcccaacaggggtaccccatttactcagcctgccctgctcaacctcttgcaggagggagcacacgagtgaacgagtgcaggaaccagctggctgctttagtgctgtgaggagtaaactccatgcaggccctgcagcagcaaccaggtaggggtgcctgcaaccccagggccccagagggtgtgttacaatgctctcgtagctctgccatctgtggacagcagtgtgttgtcagctcagtgggccctttgcttcatcatgtagggtggctgccctctgcctgtgagggcaaagggccagggtgacagtctttttgggtacccacaatttgtgcatcctgaattcttgtttggtgcccaagaagaatggggtcacacagatgaactgaaggatggtgaatgcagagaattagcaatgaaagtggctctcagcagagagagaagctgaaaagggaatgggaagggcaggtcactctcccctgaagtcaagtcacatctctccaatgtccagccaccatctctgaagtcaagtttcctctctctgatgtccagccacttctcctctctactggctgagtctggggtatttataggcagaggataggtggtggggcaggccatacataattttggaaaaggcaacattctattggtaaaaagacattattcataaagaaccaattgggaaagagcgggcacacagggatggaagttctcactttgggctgcaggtttcaggcttttcagctcaaaagtgaggtttttccagggacctgccccgtctgcctaaaatttctacacttctgtcattgataccgctggataacagctctcctataaagttcaggggcttaaaacaaaaatttactaattcacccggacagttcttgatagggtctctcctaactgttgcagttacatagcaactgggttggagtcatcttttctgggcttgacatccaggacagcttcttcccttgtgtgtctggtgcctcagtgctcctccaggcagcctttctctccagaagagtagcctggacttcttggcaactcaagcttccaaaagaaaaaaaagcagagactgctggttctcttatcaaacaggcctggaactggcacaatgtacttctgctgccatattcaggaggtcaaagcaatcgaaggccaatccaagttcaaaggcattggagaaaaatgagaagtgtcacttaaatgagaagtgacacatgcgtaaaagggggaaaagcattgattgtggccatttttggagataagctatcacgtttatttgtttgtttgctttctaatggtctgtcttctcccattaggttataagctctgtgagacaacaggaatcttgtccatcttgttttatggctctacttccaacacctagaataatgcctggcacatagtaggtgctcagtgaataacttaagcacttgatacatgtttggggaactaaaatgaacagaattaaacttccccagattggtcctgccagatttgctgatgccaagcatgctgatgcctcaccagatgaaagaagccctaaaatgtagggtttcgctttctctgcaaacaagaaaaacttgccctgaacacaaaatctagaaatagatttggcgtgttttctacattgaaatatttcccgtagtaccagaaattattttcccacagctttgtgctacattaaaatattgaagttgactgaaaatatctccattctttaatcttggtgtagactagaaacaatttttttgtaacaaagtaaatatgaaaacttcctaatatttgaactccccagatatccccagatatctccaaacttaaaatatcattgcaagttaagataaatttttttaaatgactaccgagaaaggtcattaaaggcttggttattaaaatgtacagatttgggttataaagccagaacttatttgtttaaatcattacatatgaccaagcacagaaaataaattacctcaaatctcctctttgctaatttttactggtaaactctataaaatgatcctatctttaaacctttttgtaaaccccttataagttagtaagtgagaatgtattcatcagaaggattttagtgatgtttgaaattaaaaaagagagatttgatttttaaaattatacttgcagactactgctaatgaaacttcttctaaccctagttttgtcttatcttcagtttttccagatttgctcaaagcaatcccagtgagcatccacgtcaatgtcattctcttctctgccatccttattgtgttaaccatggtggggacagccttcttcatgtacaatgcttttggaaaaccttttgaaactctgcatggtcccctagggctgtaccttttgagcttcatttcaggtaagtacaaaattctacctctgaagacaaatgtgcttttcaatatgtcaaaaagaccgtctacctaaatataaagttataatcttaacatatatacatggatgcacactgtagtattatacataataacaaaaagtgtggaaataccacacttgctcaacagtagggaattcaataaatactttatggacatctatatgaataactgtgatgctgacattaaattatatttttgaagatgtaatcaagaggataaacgcttgtctcaaaaagttacatgggaaaagcagtatgtaaacttatataaacattgtgaacctaatttgattatatatataaaatatagggaatatacatataaaatacatatatgtatatatgggggctatatatatatatatatgaaagagatagatagatagatagatagatagatagatagacagacagacagacaatacagactccaatctgttggtcgtggttgtctctgacccatgacactatgggggacttttatttttgctcatacttttcaatatttcttagtgttcaataatgtgctattatttatacataataataaaaataaataaatggcatcaaaaaagagtaaagggccagtgttccgcccacatatgagcagccatattcaagcctgtagacactttgtgtagcctaatgctaggtgtatctgggcaaggataaactctaaagccagaaattagttcatcaataaacatgtgctactcaatagctagggctgatggaaaagaatataaaacccagtctgtgccaaatggtgcttactatctgcaagtgggagaaggagaaagacgagaaaatgaaaaatgtgtgtataatttatatgtagctgttctgtaggagatctctgacttcaccccattctaactttgcaaaaagatccaacactttgtcagattcctgggaggcaagtaattttattgatggtttcatggagggatacagaacgataacaactcacacaaagcaaacaatgtaatgaaaatctctattcgactgtttctttttctcctgaagttgccctttggctgccagctaccaggcaccaggctcaaggtactttcttgctcttgacactactcccttctctcatacaattcaaccccaaccacaaacgtgtatagatctctctctctataaaacaaaggcctgtagttaacaggaggtcacttgcagtgtagcctctgttcattgttacttgtgcacactgcttagggtctcaccccatccacattctgctaatcacattattcacccatccaatgtagatctctccagtggagattctgctaatattttctttagatttgtcacaagtatataatacagttttaaattgtacagatgattatcctataacagaagagtctaagccttttacatctttgtatctctaacgaaagcattcagcatgaagctctgtacacagcagacaattcaatatgaatttgctgacttgaaacagcaagcctagaaaggagatgttaacttggtcacttagacagaacaggtttcagcaatcagaattcagatgacatggaactggtagaacaggcgctttgaagcaataggacatgagccagtgaggagagggatggaatatcataaacaaaggccaagggctttgcaatcagagctgaagagccaagagcacaggctcagggtgtgggcagactgaatgagaaagtgattcaatcacatgtgaaagtccagatgagaagagagagttgggattacttctgctcaccaaacatccaaaaccaaacaggtggatccgggtggtgtgctgttttactgatgaccattacacagaattttaacagaaggaatgtaaagcagtggttctcaaactggagttcccagatgagcagcgtctgcatcatctggaaacctgataaagcagcaaattctcaggccctaccccagacccactgaatcagaaacttgggggtctgggggaagatggccatctgtattttaacaatctcccttcaggagattctgaggctggctcaagtttgaactacaggtagttggttcaacaggtgttggtggactgacaaacaaaaagagactccgaggtaactccaagatggtaatgtcagaaagcagctaccacccctagggcttgggggaaccaacaaaagagtttggcattgccagaacctagaatcttgaggagaggccccagagcattgtgtctcagaccttgaggacttggcactgggacaccatgaggggtttctgggtgtgggaaagggctggaaactccccagttgctgccaccagggagaactacaagtgaagtggaaggtgtgggcctttctcccttttcttttctcgtcttctctctccccctggtgctcatgtttgacagaaaacagctgaaaaggcagaactagtttggggagtcttgacctggcatcataaagcagagaaaagcaaagctggagtgaaggtgagacacaacagctcattagcagcaacagccgtctagcgctccagcttctgaatgaaattctgaagaacagcgcacttggaagacaaattatttgacagttctgacagacgaccaaactaacagcatttgaaaagcaagatgactcagagaatacagaatttaatccaaatcccagatcctatctctgcctttggccaggcctaatgcaaggagaacctgagcacacaaatatatgcaggaatgatcaggacctgtgcctgcattctattctgtctcacccaccttcaaatttgttgtaaaaacatgggctcaataaaggtttgtgaatcagggaaggaagagaaggggagaaaggaagggaaggagccagctccagatctgtgtcttgcagaggataaaggccagtgtttttagatcacccagtgtttttctaagcccccaatacttattttgaaatatcaaaatgttcaataactaaaaaaaaaaccgttacaacaataaaacatgtttgagggtcagatggactggcagtttgtgacctctggggataaacaggtcactttggaatcacagacttcctcattccccttaaatctcatatggtacccagaagcccttggaactttggaaggtgtttattcacagttgtaatgtccatgcagaccctggctctaagacccaattgtgtaagggtaggtttgtagcccttatcccaaacattctaagtgtgagccaatgcgtcacacactcagaggccagagactgtattggggtcctttatttcacgtacgagtcacattccattaagagaccccagaagtcagctctcttccactgactggttctcttcccttgtttctcttgccaatgtgtgctgcccaggtggcagtgctcactgtcagcagagaagaaaaatgctttcctccttggacctcttttctctttttctcctccctactcacattcaggttccctaagcttccccgctccttgtgctgaagtcattctatggtcatttcttcaactgtctacttccctgctggatgggcacccaagacttggcatcctggggcatgtagaaaggggaaagggaagggaagggaaaagaagtcctcccaattgtctatctggacctttccacactgcccagagtactgctatgggcatctccttatgtctcccgatgtggtgcatgccagaccctgcaggtagaaaaggaaagaaagcaacccattggaccaggccagcaaaggcttcagtcacacagctggctcatacttatggcttcatattctgttgcctcttgaaccagacatttcttccactctcataacctccagtttagctcgtattcctcagcattctccatgtaatattgttgcatgaaacccatgcaagtcagccaatttgctctttctcatcttgtcatttataaattgatgctgagaagtctttttcccaaggtttttagtaataccttcatcatcccccatagttcattttgggcagtgattcgcttctttgactgtacattagaatcatctgaagaactttctaaaactactgatctcaggtctcacacaacactaattaaattatagtctctggtggggtagggcttgggcactgctattttaccttaagctctctggagtcattctaatttgtagccagtgctaagggttgcaatataagtgaatatatttcacgtatttgtcaaacattgactgagtgcccattatgtgccagccattataataggcactggtgatcccacagtgaatcaggcacacaatgctgtcttcacggagcttgttgtctagtgggagagtcaaacaaaagtgtatatcaataattaagtgattacagattgcaataattacaataagggtgataaacaggttgctataatatacaatagtattgcctttcaccagacatttcttaaagaggtaaatcatctatcagacaccttttaaaaatctcatctaatttcaaaagtgtacataaataattaagtgattacagtttgcaataattacaatgagggtgataaacaagttgctatgaaagagaaagatagcagagatctggctttgagatggtggtcagggaagactgctccaatagctgagttctaaagctaagaaggaactgagaaccttcacagaacgtcccaagtagaagagaaagcacactgaagactctagggaaagaggtctgcttgttgtaggaaccgaaagaaggccaatgtggctaggtgctgggtagtgaggggaaatggcacaaggaaaaaatgaggttagagagatcagttgataccagttaatgttggaccctaaacattaaccatggtaagtcttttagaattgattctaattgcaatgaaaaccttttgaaagattttaaaaagatatctgatagctgatttacctctctaagaaatgtctggtgaaagacaataccatcacattggagatggaaaaagatgaatggattctaaaaacattctgaaagtacattcaaaatgtttttcaggtagcttatgcaactaataaatagtggtggcattctgggtaagacaagggaggagcaggcttgcagtttagggcaagaaaggggtggggagaagagctcagcactaaaatcatgtgttccatttggggcacatcgagtctgagttgctatgagaccaccaagtggagatgccaagtaaatagtcagttacatgaatctggagttcagtgaagaggtctagaagaaagatgtatatttgggcattattcggatatagatattatgtaaagcaataaaattggatgagatcacctagggagagaatgcacatagataaaaactgacctaggaccacttcatgtctaaaacaccaaaagcaatgtcaacaaaagccaaaattgacaaatgggatctaattaaactaaagagcttctgcacagcaaaagaatcagagtgaacaggcaacccacaaaatggaagaaaattttcacaacctactcatctgacaaagggctaatatccagaatctacagtgaactcaaacaaatttacaagaaaaaaacaaacaaccccatcaaaaagtgggtgaaggacatgaacagacacttctcaaaagaagacatttatgcagccaaaaaacacatgaaaaaatgctcaccatcactggccatcagagaaatgcaaatcaaaaccacaatgagataccatctcacaccagttcaaatggcaatcattaaaaagtcaggaaacaacaggtgctggagaggatctggagaaataggaacacttttacactgttggtgggactataaactagttcaaccattggggaagtcattgtggcgattcctcagggatctagaactagaaataccatttgacccagccatcccattactgggtatatacccaaaggactataaatcatgctgctataaagacacatgcacatgtatgtttattgcggcactattcacaatagcaaagacttggaaccaacctaaatgtccaacaatgatagactggattaagaaaatgtggcacatatacaccatggaatactatgcagccataaaaaatgatgagttcatgtcctttgtagggacatggatgaagctggaaaccatcatcctcagcaaactatcgcaaggacaaaaaaccaaacaccgcatgttctcacccataggtgggaattgaacgatgagaacacatggacacgggaaggggaacatcacacactggggactgttgtggggtgggaagaggggggagggatagcattaggagatatacctaatgctaaatgacgagttattgggtgcagcacaccagcatggcacatgtatacatatgtacctaacctgcacattgagcacacgtaccctaaaacttaaagtataataataataaaataaaataaaataaaaaaacaaaaattgatgtaggaccaattcctgaagaacactgacagttaattttttggtttaggaggaggagaagccagcaaacgacactgagtagcaatatccaaagaaaaagaggaaaaaggaaaactgggagattatgagtgtcccagagggaatgtttcaagattaccatcagcagtgagctttgtgtaaaggtggcctcctgtaatagaggtgcgggcaggagaaggcagaatagggaaaagggggtgaaaaagcttccctcaagatttataatacagtggaagagagagacagagagagagaaagagaaagagagagagagaacttaaggaggtagaggaagagagagaaccaaaaaagagggagctgagtatagaagcaattagattcatagtttttagttgcggcagtgatatttgagtgggggccttttatatattccattctaggtgtttcccagttgatgggagagggtcttacctagatctgcatgtaaaagggagtaggccagctggcagacttgacatggatcagtggtagaacatcctagcagttctgtgaatactctctgagaatgacatgaaaggtattggttcaggccttttggaggtgataaaaaccaccaaaatgtggacttattgcaaattgtatttgttaccatttgcaatgattataattattctcttatatataggctttcttacatatagcttctcttacacatagcgtcatgagttatgccttctcttacatatagtgtctgctatgagttatgccaagcagggcaaacaaaattgctgcctttctttaaaaagaggacgctcctagtatgggcctaattaattatgataattacagctatggcatggaacataagcacattcatatacacaaagacaataaaataaagaacagttcaaaaacagaacagttacattatatatcagtttcagtatgaataataccctggactctgaaatatgtctggggcacattattctgtaattggtggtgaaaaaaaatctgcatcttatctctacgccaatccttatgaaggagctgtttttcaggagttcgagaaagagacacagggatgtccagtcatcaaagccgcagagcctgaggaagaataaaggatttgtggcaggaaaacccagtaatgaatgtattctgctagtttctcagcatagaacttagaaaagaggccacagaaggaaaagagaagtaatgttagacagctgatgttggcaatgggcaaagaatttcattctcatatgcagggcagtggctaaaggggcagtgttgtgaggaatcacattccaggtcattcatgtccagggtgtggtaggaggactgtgtttcatttattttgtacatggcccagctatgaccttgtgcaaggaaatgcttaatcattttctatcacagttgcaaagagattcttatcctactcagaatgtacgtcttctcttctgtttcatttacagtcacaacccaagtccttgctttgacctccaaagcaccacttgatgtatccacttcagaaacacacacagacagctcacctctttctatcccttaccttcctcccctcttcactcaaaccacctacttcctttgcattcactcttccttcagcctgaaataatcttcctccaaatatctaccttctcactccctcacttctctcaagatacacttaaatgttatattccctatgaggcctcccctggccatccctccccagccttcctatcccccctctctgctttattttattctccttaatatatatcacactctgataaaccattgaatgtacttatcaagttattgcctctctctccctttccattgtctccatcactgagagctctgtgaagaaaaggatttgtacctgtttcatttagtgctgtacccccagttcccacaacagcgcaacaggcactcaataaatagttgttgaataagtgaataaaacagaagtagctgcatattttctggtaacaaatgatattcttctgaaaatgtcatattttcagacatatttccgaaaataaattcaaattagataaacattgtatttttagaccatttcttctttgcattaatcatccttctcaataatataacatttgtaaaacttaggttagatatgggctcttcaactttccattacagaagataaagtgaaaaggctagacccaatggtgttattccttcatctacatctatcctttggaaacacatgaccaaattgcttgccatcacaatctcaaaatctaccctttggtattaactcacttcacttgtccctctgtccctttttagatggtagccatcggtctctggagcagtgtagagtcagaacaacttctatttggggaagaaatcattgctggtgaccttactttcaattactaactttctagtgacatttacataattttagagaaaattaacacctacacttgtaaagttgtggctttcccacacctatttatcatctctcaatattccttgaaaaggaaattatcaatttatcattctatattggcaatgaaatgcccctaatatctgtcacctataagacaattgaagatgatgtgttgaaagctttctgaaaatgctgatcattactttaaatggaattgaaattccagtttattatttccaaaaatatgatcttactgatcataggataacatttcataacatttcagagatttcttccccttcgaggagccaaacccataggacctctggactcccacagatcctggcagggagttcccactcataaaagcacaggtgccctcagagtcattcagggatgaagaagcaaccctcattggccatgtcctacgttccccatatagtaaggactggaggagaccagtgctcaattctgcagtctcagacagctgtcagaggagagtcatgaatgtgcagtgtctagcacattacaaacgtttgttaattgactgatcattcatggtgtgacagccctataactcagctatcctattcagtcagaaattaactcagtaatcaaagtcattaaaaggaagaaaaaaaaaacctacagtaccagacagatggtggggaaatcagacagatgaaaggaaaaatggctgtaggtcattgagtaagacactgggcagcaaaacctgggccttgtgcctggttatactccacattatagctccagcaaggtttggcaggatttccacagtcctggcttattctaacctttcttgggagcaggagcagtgttggtcagatagacagacacataaggaatctgtccaactggcaccgtgtgaatttgggctcttggtgtacatggataactgggaaaaagaggagagagacatgtaggactgatcctaccgtttgtgaagtcttgggcaagagtatgaatgaaaacccacttctcttcccctgcctggctccactgcacacagtaaagagcctcaagcataggtgtgtggacattgcaccatgtatccaagctctgaccatgcctcttgaaacagctattcctcagccaccctctgaccatgggaggaatgacccaggagaaatgaccacataggtcttgaaaatgggctcagggctatttacgaagtcaattccggggtcccaggagtatggactaaaatgtgagtcaggcatgccagatgggtatgttctattgacttcaaggattcctcatgctgtgggaaggaacctctccagaagagagacagagcagaaccctctaaatgtggggcacaaagcaggagcccctcttgctggattcaaagggtcatactggaagagtgtaggttgagtcttattctcacatcactcatatcacttacacacttcttttatagccttagcagccatgccacaaagagaaactcttcatgcatatcttttggtccataagtcataaatagttatccttgatcccatgtcttttttagagccatggacagagagaagcaaaaatataccaagttcacactgagttgtctcccttcatatctcttagcagtcactgaaaggttatgagactcaggctgggtttctatcctctgtccctgaaacgacaacgttgacctcgtgatcaaccctagaatccagagcaagatctcagactgtcctctctactaccagacagcacactttgttttgggggctgtgtgcttgaaatattagctatggcaaaaggctttgagtcttatgacaccccaagtaacttttactttaggaatttgaaatacagccttgctgtaatgctgtctccttaacaaagcagtacctttgaaatatttaacaacttgaaaaggaaaccgagcttgaattttcctttcaggtgctcaggaaataatgtttcacttctgtctgaaattcaccatctcctcagacaaagaaggctcttatggtaaaaggaatggcattttctccacaattttcgaataaaagataaagagaaaacagcactgcagcctttttgttaggatctaacaataaagaaataatacggttttgccaggggagagctctggttttaagctcagaatacaaaaataggctgacaaaattttacaaaggaatattctcagctaccactctgaggatggtagaaagtgaaatttcaagaaaattatattatttgattatttgatgatgattaagctgattggccagtcctatgtgaaattctaaagtagaagaaatgtgatgttgtcttttctgctcacctctcccctcattcctacccccaaatctctgcctctaccccaaacccagcctgacctttgggaaaggaatgggggctgtcacttgcaccgtagctcctcctgcctgcagtactctccccccacagtccagcctccctctgctcagctaacttttcctatagctccttctggctacttctaaggaaccttccataatgctgcccaccctctcagtaacagcccctctactatcccttgattacatgcactgtaattggttagtaattgattttatgtcctctgccaaattatactccatgagagcaaaaatcatgagtattatctttaatgtttaaatctccacaactatcccccatataagtctagagaataaatgaatgagtgaattaatgaatagaaactcaagccattatgttgccactcctaggatatttggattaactttaactgaagagtaaaaagcatttacctgtcctaaaggagacataaaattagtgggagagtatttggagaaaaaaaagacactgtaatacattcttttgtgttgcctaccctgatgtagtcaggtgtccctgatatggggtgggctgaggatttgaaataaaatacctaatttgacattgtaagtggaggaatcaggatttgaaaccaaattggtttgacctaaatcaagctattatgataaggacttgcaagaaaaaaggaatccataaaaaccatatgaatagctaccaattagtaagcatttatatgtgtcaattacaaagccaaatgcaaatcatgctttatttatattagccaccttttatagatgaagaaattgagacctgaatattaaaattgcctacttttacatagtaagtaaaggaatcagggtttgaacccaaattggtttcacctaaggtagaaaaccatcccagcaagtctcctattaactggaaccctattgtggtggcctgagatataacagtagctgtggaagcgctgtagagtcctggccatcctatgtgctcctgatctggtccctcctgccacctgcttctgctccctgtgccatccacccatctggaagtctcccagtgtccatcttcgggggagacactcaccagagtttccagcttccagccagtatggagtgcccctgtcccacagcaatctcaccgaaatcacagctacatctgttaaaattaggctaccaatgagtgatagatgagggggaaaaataataatagtgtactaaacaaaacaaatgtttatttttctcacacataaaaatctagaggttgaagtccagggctggtccagaggctccaaggatctgggatttagactccctctttcttgtttttccacagcatatggcttccatttctggggccacattggtccaaaatgtatgctggggctccagccattgcatccatatttcagccacaggaaggaggaagtggggaagaaaggacaggcccctaatacctgtatagttcaagaagactatcccgcccatacttcccaaccacccttagttgaacaatgctgtcttaattcaagacactcacatgtctagccaaaaatctgaattctgttacaaacaaggagaatagagatgtgcgccacctcaatacctcatccatagctaccttttcctttgtgcagctgtggccaagtgaaagctgaaggagctgtggtaacccttctgaagggaggctggggcctttcacaagaggctgcatgattgacatttatcctgcatggcctgtgaagtacagagaaatattttctcttgaagccacatcatagcagtggctgctttgtagcctgattccaccattatgcctttaaagtgcctagcaattcagccttcacatcatgcaaagaggaatatctcccagtctttgtaagatcagcttaattctaaccacctccttacctcccactgcactcctacacgcacacacaaatcttcttcactcagagcagaaccataacccaagccctaccacctagagactgaagaatcaggctcatgattacaaatatgcaataattttttgtgtggataatgtcaatggggatgatggtaagagaattccttggtttacacattgaccctcttccctgtcccttacaatcaggaaatatttgtcccaacaccttgtttcttctgttgcaggctcctgtggctgtcttgtcatgatattgtttgcctctgaagtgaaaatccatcacctctcagaaaaaattgcaaattataaagaagggacttatgtctacaaaacgcaaagtgaaaaatataccacctcattctgggtcattttcttttgcttttttgttcattttctgaatgggctcctaatacgacttgctggatttcagttcccttttgcaaaatctaaagacgcagaaacaactaatgtagctgcagatctaatgtactgaaaggcaaacctttctataattttacaagggagtagacttgctttggtcacttttagatgtggttaattttgcatatccttttagtctgcatatattaaagcatcaggacccttcgtgacaatgtttacaaattacgtactaaggatacaggctggaaagtaagggaagcagaaggaaggctttgaaaagttgttttatctggtgggaaattgcttgacccaggtagtcaaaggcagttgactagaatcgacaaattgttactccatatatatatatgtgtgtgtgtgtgtgtgtgtgtgtgtgtaagatgtcttcctatcaaaaagatatcaaaggcacatggaatatattttaataaaaacaaataatatctctaatatatccacacatttgttgccagatttcagaaaactgagctgcaatcgctttcctaaaacagtagtgtattaaatgaacatctataaaatgtatcaacacacattttaaaaaatttgtttaaagtatactcttaggccaggcgtggtgactcacacctgtaattccagcacttcaggaggccaaggtgggaagatcatttgagttcaggagttcgagttacagcctgggcaataaagtgagaccctgtcactaacaaaattaaaaaataaaataaatataaaatataggctttaaaaaagcatagtcttattaaccatgtctgttggtcaaaatctgcaaactctaaaagaagaaaagaagaaaaaaccaagcttagggtatttttcctcccgtgcctgagtcccaattacattcacgacagtactttcaatgaacataattgttaggaccactgaggaatcatgaaaaatgatctctgcttagtacatttgatgcaaaatgacttattaggggctgtttttctagctatagtgtctcgagtactaatatgcaattatgaaaattatattaaatctgggattatgacggtatcactgtatcatcttggtcttgttctggctgtcaccaagcatgacccaggtcaactttttttttcccctgaattacccatcaaattgatctgcagctgactaaaggccacagctgagcctggaactgacccttccttcatcctcaacctgctgtcctccagaaagcaccaaggaaaaagcagagaatgacagcaaacagatcactaggcctctgaccacaggtgctgagtactcagcagccctcatataataggtttgaaagtactccttaaaataaaacactgtttccctttggaactatttacaaggatgaaacaaccgtatacctgagaaataacttgctctggtgtcaattcgctattcgccagcagacatcagaacacaccgagtttccagatgctggtttttccccttaaatcaggaaatacacctggacaatttctagaagactacaattcagtctagccacaaaggggattttttttttttggtaacaggctagagcccggttctgtaagtctttagctgaaatggtccagtacaaaagcactggaaatgagtgggctaggaggacaaggaccgtctcctgcgtgaggagttggttggaggtccccaaggccaggtaccccctgcactcttattggattcctctctgtcttcttggagttttgaaaaactccttcgaacaccaggcttttttctttagaaaacaagtctccaatcgttctctgttccgtagaaagagaaagaaaacctggagcagctgctgaaaaatctaatgaggaactaagaggcaaacccacca

SEQ ID NO: 48 - protein, 760 aa, Homo sapiens
MSPKKVQIKVEEKEDETEESSSEEEEEVEDKLPRRESLRPKRKRTRDVINEDDPEPEPEDEETRKAREKERRRRLKRGAEEEEIDEEELERLKAELDEKRQIIATVKCKPWKMEKKIEVLKEAKKFVSENEGALGKGKGKRWFAFKMMMAKKWAKFLRDFENFKAACVPWENKIKAIESQFGSSVASYFLFLRWMYGVNMVLFILTFSLIMLPEYLWGLPYGSLPRKTVPRAEEASAANFGVLYDFNGLAQYSVLFYGYYDNKRTIGWMNFRLPLSYFLVGIMCIGYSFLVVLKAMTKNIGDDGGGDDNTFNFSWKVFTSWDYLIGNPETADNKFNSITMNFKEAITEEKAAQVEENVHLIRFLRFLANFFVFLTLGGSGYLIFWAVKRSQEFAQQDPDTLGWWEKNEMNMVMSLLGMFCPTLFDLFAELEDYHPLIALKWLLGRIFALLLGNLYVFILALMDEINNKIEEEKLVKANITLWEANMIKAYNASFSENSTGPPFFVHPADVPRGPCWETMVGQEFVRLTVSDVLTTYVTILIGDFLRACFVRFCNYCWCWDLEYGYPSYTEFDISGNVLALIFNQGMIWMGSFFAPSLPGINILRLHTSMYFQCWAVMCCNVPEARVFKASRSNNFYLGMLLLILFLSTMPVLYMIVSLPPSFDCGPFSGKNRMFEVIGETLEHDFPSWMAKILRQLSNPGLVIAVILVMVLAIYYLNATAKGQKAANLDLKKKMKMQALENKMRNKKMAAARAAAAAGRQ

SEQ ID NO: 49 - DNA, 2283 bp, Homo sapiens
atgtcacccaaaaaagtacaaatcaaagtggaggaaaaagaagacgagactgaggaaagctcaagtgaagaggaagaggaggtggaagataagctacctcgaagagagagcttgagaccaaagaggaaacggaccagagatgttatcaatgaggatgacccagaacctgaaccagaggatgaagaaacaaggaaggcaagagaaaaagagaggaggaggaggctaaagagaggagcagaagaagaagaaattgatgaagaggaattggaaagattgaaggcagagttagatgagaaaagacaaataattgctactgtcaaatgcaaaccatggaagatggagaagaaaattgaagttctcaaggaggcaaaaaaatttgtgagtgaaaatgaaggggctcttgggaaaggaaaaggaaaacggtggtttgcatttaagatgatgatggccaagaaatgggcaaaattcctccgtgattttgagaacttcaaagctgcgtgtgtcccatgggaaaataaaatcaaggctattgaaagtcagtttggctcctcagtggcctcatacttcctcttcttgagatggatgtatggagtcaatatggttctctttatcctgacatttagcctcatcatgttgccagagtacctctggggtttgccatatggcagtttacctaggaaaaccgttcccagagccgaagaggcatcggcagcaaactttggtgtgttgtacgacttcaatggtttggcacaatattccgttctcttttatggctattatgacaataaacgaacaattggatggatgaatttcaggttgccgctctcctattttctagtggggattatgtgcattggatacagctttctggttgtcctcaaagcaatgaccaaaaacattggtgatgatggaggtggagatgacaacactttcaatttcagctggaaggtctttaccagctgggactacctgatcggcaatcctgaaacagcagacaacaaatttaattctatcacaatgaactttaaggaagctatcacagaagaaaaagcagcccaagtagaagaaaacgtccacttgatcagattcctgaggtttctggctaacttcttcgtgtttctaacacttggagggagtggatacctcatcttttgggctgtgaagcgatcccaggaatttgcacagcaagatcctgacacccttgggtggtgggaaaaaaatgaaatgaacatggttatgtccctcctagggatgttctgtccaacattgtttgacttatttgctgaattagaagactaccatcctctcatcgctttgaaatggctactgggacgcatttttgctcttcttttaggcaatttatacgtatttattcttgcattaatggatgagattaacaacaagattgaagaggagaagctagtaaaggccaatattaccctttgggaagccaatatgatcaaggcctacaatgcatcattctctgaaaatagcactggaccacccttttttgttcaccctgcagatgtacctcgaggaccttgctgggaaacaatggtgggacaggagtttgtgaggctgacagtctctgatgttctgaccacctacgtcacaatcctcattggggactttctaagggcatgttttgtgaggttttgcaattattgctggtgctgggacttggagtatggatatccttcatacaccgaattcgacatcagtggcaacgtcctcgctctgatcttcaaccaaggcatgatctggatgggctccttctttgctcccagcctcccaggcatcaatatccttcgactccatacatccatgtacttccagtgctgggccgttatgtgctgcaatgttcctgaggccagggtcttcaaagcttccagatcaaataacttctacctgggcatgctactgctcatcctcttcctgtccacaatgcctgtcttgtacatgatcgtgtccctcccaccatcttttgattgtggtccattcagtggcaaaaatagaatgtttgaagtcattggagagaccctggagcacgatttcccaagctggatggcgaagatcttgagacagctttcaaaccctgggctggtcattgctgtcattttggtgatggttttggccatctattatctcaatgctactgccaagggccagaaggcagcgaatctggatctcaaaaagaagatgaaaatgcaagctttggagaacaaaatgcgaaacaagaaaatggcagctgcacgagcagctgcagctgctggtcgccagtaa

SEQ ID NO: 50 - DNA, 314551 bp, Homo sapiens
cagaaactatgagggcagaacccagcaatctgtgctttctttcacaagccctccaggagttgctgaaatttaggaatcattgccccaaaaagtggccctcataatgatgccaggtaaggaaagacaacattattacctatgtgtggtgtgttaacattctttatgaaacatgtgtgaagacctaaatcgaagactttctccatgagatattccctaatcacattagtgaaataaaactatatttcctctacttttctactgctacagaaatctcccccagttaggatagtcccagtttcctatttatctttgtttttcttgcagtgcacagcatgtcacccagtaattgataagtttttttttttttgagacggagtcttgctctgtctcccaggctggagtgcagtggcgcgatctcggctccccaagtagctgggactacaggcgcccgccatcacgcccggctaattttttgtatttttagtagagacggggtttcgccgtgttagccaggatggtctcgatttcctgacctcgtgatccgcccgcctcagcctcccaaagtgctgggattacaggcgtgagccaccgcacctggcctaattgatatgtttaaatgttaaaattaaatgcaatgatttcctaaaataaacaaatgtgggacaatttattgcactctgttcaaattcccattttgaagtggaattcaaacaaacatgacagtaaagggggacagtgagcacagggacaagagaaaaggagaaagggaagaaatacagagaactagataggaggaagtgtcaaagactgatgggtgtaagccacctttacctctggatattggttttcctttgaattgtggtatgtggtcatattgcttattagttataacatacagctgtcagaagagtttttcaattaaaatttcaaatgtaatattaaaactgtttggattccttcctactgggcactggacactgtctgtggagctgctggaacagcgctgaatagggtcatattttaaaggaactcagcctagtgcagtttctcaaccttagcactattggcctttggggcctgataatccttttttgtgaggggctgtcctgtgcactgtaggatgtttagcagcatccttggcttctactcagtagatgacagtatcaacccccttccccagaagtgacaattaaaaatgtctccagacttttccaaatgtcccctgaggagcaaaattgtctccagttgaaaaccactgggttagtgggagaaacagataagacagaagttctccatacaccatgataatgccatgatgccatagggctggcaggagtgaagggaagagcatctcacaaagactcggggggatgcagggaggaggaaaaattaggaaatgaagtgggctgagttgcagttagcctgtggggaaaatgaaggagaagggataaggaagaagaggaggaaggagggaggaagagtgaggagtaatagggaattatagttgaccttgaacaacttggggtttagggatgccgacccttgcgtagtcaaaaatctgagcttaacttttgactaccctcacactttcctaacagcctactgttgaccagatgctttaccaataacataaacagtttattaacacatattttgtatgttttatgtattatacactgtattcttacaataaggtaagctagagaaaagaaaatgctattaagaaaattgtaaggaagaaaaaatatatttactgttcattaaggggaagtagatcatcataaagctcttcatccttgtcatcttcaagttgaataggctgaaggaggagggggagagagaagagactggccttgctgtcttaggggtggcagggatggtagaggtgcaggaggtggaaggggaggcaggaaaggcaggcacactcggggtagctttcgttgaaagaaatcttcatatgagtggacccatgcagttcaaacctgacttgttcagagtcaactgtacttgttccaggctaagaacagagaataaaaaaaaaatgtatagaggcctgaaacagcatattatattaaaagaactcaaagccggtaaatgctttgctactgaagcataaagtgagaaaggggcatcatgggctctgaaattgcagccacaagtctacagaacacatttttcatagcccaaggtcagtcttctattaccctttgcagtgaggttatcatcatccattttcactcgtcagtgctggggagcccattaaatacttgccactatacttggtcccaacagttaatagactgtagcatcttttatttcttcacctagcctgaaatcagttgagcttttgcagaatcttagatatgtcgtttttttcttcaggtttagaatggggcacttaaaaagatgcatagtacttgaaaatagagaaagaaaatagcatgtagaaatttgtgcctttattctgcccaaacgtctcaaaaaggaaaaaaataattttaagggtaaatattgtcatcaatttatctgagctcttttgacttcctttgagcctgaaaaacaggatcagtgtctttttagtatttaccatagtgcctgatatgtagaaggtgtttgaccaatgtttattagataaatgttcacttttattactagtaatattaaccacattttaatagagactaataatacatgataaacttctcaaggatgcgatctcatttgatcactataacaacccaatgaggtaagcgaggaatagttgttaactctaatacatgttatatcttatccttgacccagtattaccccagtcatgccttcctttccctgcaatgaaagaaaaccgataaacacaaaatgttgtatcccatataagcattcattcttatggtagataagtaaatggaaaagataggtatgcattctcaatttttttaagtcctagaattataaaacagtaaagaagtgagaagagagagaaatcttaagggaccaacctcttgattttacaggtgagaaaactgaggccacatagccatttagtgcagagccaggattataaaccagatgtttggaatcctatgtggtggtggacacgaggatatactaattagcgtcgttaccggaaaattccacatatctctaaggagcagatcaccacacacctgcacagcccaagcctggattgtggaggtttttcttgtagagtttgtctttgatagaaagatacggtccagaaggccggcttcaaggacataagaaagggcatattcaaaacaaatacatgtatgcctattcttttaaaccggtacttaacaatagtatccaggtgtccaaatataatagcttatctgttttattttttccagaaaaggaaacaaggtcttagagaggttacattttgcataggattttgttagccaagtcagcatctgtttgcatcttaaaaatgagtcatacctattccttgtaagtaggacaggagggcagctggaatttcccagctcactccttgtcactgcttcctgcctctgctgctctttgtcctccacagcacgcttcattggctaaaaagtgaaccagatactacattacctcagggcagttgtaagtactgagtcagatgccttaggcttgtgtgatgggaagtttagggcgagaccaatgtcttgctttaacaacagtgtgaataagttaatttcttttgagattttattactcaatattccacccagaaagaaacacagatgacactcagccaatcaaaggccatctgggactgacaaacgcagagcttgttgtagatgacaaggctcagtggatggatcatcactgaaagaaagggaaacagtttgaactgttgtatctctctccttgctcacatgaaaaacaaaaaaatccttggccagttgcggtggctcacgcctgtaatcccagcactttgggaggcccaggcgggcagatcacttgaggtcagaagttctggaccagcctggccaacatggcaaaaccccgtctctactaaaaatacaaaaattagccgggcgtggtggcacacacctgtattcccagctacttgggaggctgaggcatgagaattgcttgaacctgggaggtggaggttgcagtgagccaaggtcgtgccactgcactccagcctggatgacagagtgagactccgtctcaaaaaaaaaaaaaaattccttaaccacagactaagtaagcattattgcacagagtgtcattcgctaatcttgcttgtgcctgaactttgaaagcaccagccccttgctttgggggctgggggcgtggggtgtaagtgtgtgtgtcctctagaagaagacaacactgagaacagaaggagaggatcttggagatttgttaatttcctattgcagttagccttgtctggggctctcactttagcacttaaaataacatactcctttgcacagatgttatttttttctcttcatgtgtacaacttgaattatccaatggccttgctttgaggatattcatcctatcttattgatcctgtcactgtgtaggacaatggagaacacagtaaaaaaccctcaatggatactacttacactaaattaactctatgaattcaaaatttgaagatgctacttaatcatgtaagcctggttctccaaaacttcatctgccatgggaaaaatcaaagcttgtaaaatgattaaacttgtaaaggaattaaactctaggattcactcattttataattggtattttcaccctaagagctttctttttcctctctggtgtttaaaaacaaagtaaaaccagacaaaacaagattaactaaattaaaacccctgtgactttaaaaaatgtagccaagaataatgtgcaagtgtctagttaggccaatagatatccttaacatacgtgagctgggaacacaaatgagcatgaagggcaaggaagagcaccaccccctgcttcttttcctgctcctgttcttgcagagggtcaggcttggagaccacatatggtcagctcaacactcaagtccaccaagcagcccatgaggaactcttccttccagagttgtgcacaccatgcagtgtggtccacctgcagaagcacacaacaggcgctgcctgggccagaggtccattcaggccatggaattggtctcaatgccatttaggcatgaatccagggtcctgggtaccagacgcatggtctaggtagggggtgtcatgtactaggtgagcatggggttccgctgggcatgttcccttgtcttgtaggatgttagctctgaggggcgtggctggaagaaggctagccttgagccctctaaaaggcagggctcagggcaaagctcccagttgctcaggcctgtgggtaatactgcttaaaaatccccttgagaacttctttaaaatgcaaatatctcgattcttttgtagttcaaaagcatgatgattgggtgttcacaggcatgtgtaagacgtgacaccctctgaacctccttatgacccggtacattacctgtctgacctgaaaaaaaaatgcaaatttctggattctacccgcctccccgcactccgacattacgatgtagcagctctgtggtaggatccaggaatctgcctgtgtaatcacaggttgatattctggtgtttcctggttttgctctgctgatttgggggatgtttaccagcaggagagcagcctctttcctctgccctcctcccttgctgccctccccagaccccagtgactcacgctcctcctgctcctcctgttgctggcctctctgttgtggttgccagcgctactttgcagacgctgcctgctccctgcacgccaacacagattctgtttccctgcgaccgctgctgctgttgtttgttccgtccctggtttattgtaggagagctgattgttctgttgccactgctaccaagctgcaaacaccaggctcacggtgcaaggggaaggggcttctcctctgggtgttctgcctctatcgcctaggctctcaggctttgttgccaatggcactgcgagaccctaaactatggccttgtgattcccacatctccatttagttctttcttttgttctctaagatctgagaaggagcccatgtctttcagtgttcctgttttcttgcgatacttcccccctccccgactccagaatttagggcaaccttctgctgtggtctgaatgtttatttctctccaccccgccaaacttatatgttgaaatcttaacccctaaggtggtggtattagaaactgaagcctctgggaggtaattaagttataaggacaaagccctcatgaatgggattactgttcttataaaaaaaaggccccagagagctagctagctccttccaccatgtgaggacacaacgtgaaggtgctgtctatgaggaagggtccctcaccagacaccaatcatctggcacattgatcttgaacttcctatcctccagaactgtaaacaaataaatttctcttgcttataaaccataagttcatgattttttttttttttttgagacggagtttcgctcttgttgcccaggctggagtgcaatggtgtgatctcggctcacaacaaactccgcctcccgggttcaagcgattctcctgcctcagcttcccaagtagctgggattataggcatgcgccaccatgcctggcgaattttgtatttttggtagagacagggtttctccatgttggtcaggctggtctcgaactcctgacctcaggtgatccacccgcctcggcctcccaaagtgctagggttacagatgtgagccactgcacctggccaagttcatgatttttgtaattagcatccaaaatggactaaaacccccatcctcctgaaggttctgaatctgaggacccaagacttggctctcagccttaatgtcctgctcccactattttcagggggcccaatataaatttcctgagtttttgaggtggttgggcttgcagactgacctttagtatgccctttgttacatttacaaaatagattgcttacagggttagacaaatacagttgaccctctgtatccctgccttccatatccatgggtcaaaattatttggaaaaaaaaatgtgtctgtattgaacatgtatagattttttttttgtatatttcctaaactatatcgtataataactacttacagagcattcatattgtattaggcattataagtagtgtagttatgatttaaagtatgtgagagaatgtgcacaggttatacagaaatactacaccatttttttttttttaatcagggactgaagcatcttttcagctatgactttggtatccggtggcgggtggggcggtgggtgggtcctggaaccattcctccatgaataccaagggataactctaattgctaaatcgtttcctatttttgtgaactggtaaaggactgcatgagaaaggccaaaaattaaagaataatatgcttattcaagcccggtgtggtggcgggcacttgtagtcctagctacttggaaggccgagatgggcccaggagtttgaggctatagagggctatggttgcacctgtgaatagtcactgcacactagctcgggcaacatagctagaccctgtctctaaaaaagaaaaattctgctgtaataaacctgcacgcataaaatgatgtctatgtgtctatatagtgtgtatatacatatgtgtttaggaaatgtgtatatatgtgtgtgtgtttgtgtgtgtggatactgtattagttaagacaaaaaaatctggcttcatatgttataaaataatgtctggagctatccactcaagtgtgctttcttgtttctctgtttttttttttttcctatttcattcagtggttttcactgcctttgggaaaaagtgacacagcaaaacacttagaagaatcaaatgtttatcctttgagaatgtggtctgtacataagagaaaacatttagaatcaaattatgagactaaaccagtttccctcacctgcagctagataaaaatttctaagaggaaggagagaatcaggaaagattgaagacttgactccctgataagggttctgcccgagttctgagaatggagaataaaagacaccctccccctctctaatagattttgtcagtgaaggtcagagaggcccacgaaatcaggtctggggagcaaggtaaaacccagaatttctacatgatcatgttaaagagggaataaaggaatatcattatagtgtatctgggcaggtgggcatgagacagcctgattgagttcctgaaatcccaggtcggtgtgggagcagcagaatattttaggtggctgagagctccatagtttctttctttctttctttctttgagatggagtctcactctgttgcccaggctggagtgtagtgacgcgatctctactcactgcaacctgtctccctggttcaagtaattatgtctcagcttcctgagtagctgggattacagatgtgtgccaccacacctggctaatttttttttatttttagtagagatgggattttatcatgttgcccaggctggtctcaaactcctgacctcaagtgatccacctgcctcagcctcacaaagtgctgggattacaggtgtgagccaccagcagtcccagctactcaggaggctgaggcagaagaatcgcttgaacccgggaggtggaggttgcagtggaccgagattgtgccactgcactccagcctggtgacagagcaagactccatcttaaaaaaaaaaaaaccttctcaaggtattttctgtgcttcttgttttctcttttgtatttttcatctttatatctttgtgtttcattctggataacttttagtgacctgtctcctagttcactaattctctttttagctatgtctagtattataatttgtttattgaattattaagtttaggtatcaaattttcagctttaggatatctaatttgccacttgttttctgccatgattttttttttttttttgaggtggagtcttactctgtcacccaggctggagtgcactggtgtgatcttgactcactgcaagatctgcatcccgagttcacatcattctcctgcctcagcctctcaagtagctgggactacaggcgcctgccaccacgcccagctaattattattattattattattatttgtatttttagtagagacagggtttcaccatgttagccaggatggtctccatctcctgaccccatgatccacccaccttggccttccaaagtgctgggattactggcatgagccactgcacctggcttctgccataatttttaaccttgagttttacctacttaaacatagcaaacacagttgtttatatatttatctaataattccagtatcaggagcctctggagtctacttttgtctactttcattgttttttgttttttaaatttacattaacagtgtctagtctgtatttatgcctggttacttttgattgtgtgctagacattgtttttggcaaataattttttaaacacaatatgtacaaatcatatgaagcctagactggtgttttgttcaccaaaaaagattttaaattacttcagttacgttcctagggacactattaactcaggatgatgttaattgaagtttcagatttgatattttccaggtcaactggaccaactgtccctgctatatgatttatttcctaaagcaatatcaagttcagctctgcacctctcttatatactatggagctctcagtcacataaaatattctgctgctctcacactgccctgtagttcataagaggaacagtttactgttaatccgtattactcttacatctagggtgtagctctttgagctaccagtccaaagtgaagaataatttactgaattcctactttgtctggctctaggcactgattttttttaccctcttggccacctatcttcaattggaaaatgccctcaattcaaaaatgctccaagtgccaagctttcctatctgaattcccattttttcctgtatctggctggcaattcattagaatcctgctagccctctgatgcttctaagattttcatcttttatttttatttatttattcgagatggagtcttgctctgctgcccaggctggagtgcagtggtgtgatcttggctcactgcaacctccatctcctagggttaagtgattctcctgcctcagcctcccaagcagctgggactacaggcatccaccagcatgcccggctaattttgtatttttagtagagatggagtttcaccatgttggccaggctgatcttgaactcctaacctcaggttatctgcctgccttggccttccaaagtgttgggtttataggcattagccaccatacccagcctgaagttttgattaaaaatgctttactgggctgggcatggcagctcacgcctgtaatcccagcactttgggaggttgaggcgggcagatcacttgaggtcaggagttcgagaccagcctgaccaacatggtgaaaccccatctctactaaaaatacaaaaattagccaggtatggtggtgcatgcctgcaatcccagctactcaggaggctgaggcaggagaatcgcttgaatctgggaggcagaggttgcagtgagccgagatcgtgccactgtactccagcctggacaacaagagcgagactccgtctcaaaaaaaaaaaaaaaaaaaaaaaaaaaaaaaaaaaaaaaaaaaaaactttaccggaattaaagcccagtcatcttgaagccatgatcatgacgctgtggaagaaccggtgaggtaggatgagacatattctcagatgctatgctgatttggggctgtgatgattttggaccatagactatgatgaggcttcaaaaagagtgcaatagtgtattttaatttctttggttagattcaaattaatcttcagaaagacaaaatgcagatgtagtcttgttagagcttgctgatgagactaaattttccaagtgtttgaggaatgcctaacaggggaaaggcaaagcaaactatttttaatgaccttatggctctgaattgctaaaagggagtcagtccaccaggctcaggctacttggagtagaggatcctgtttcagtgacaaactggctcatcccttaatctgccataaaatgatggcttagcatacatgtaggagctggggctaagggagaaggaggtgctgtgttttgcagaagaagctacattctgtagtaaggcctgactcttccctggccttggaggggaaatacttgtgagacagtggccaggatcagctgaagtgccctctcttcttgctttgcctatgggacactgagcccctttttgtggaatatattcatccagagaaccctcacaccttataatgcataaagtgataaaggcttggagatctggagaaacccaaggtgcgatccctggctctagaagaaactctgggcagccagcatgatttacttttctctgctccaaagactggaggataaattaaaggaaaagagggtatgacccagcaatccactggtgcgagttgttgctttaagcaaagactactgcttctcttcctgattttcccctgaccatactctcccagaggtgtctcccagcaaccaccagagttgtggttaagtacacctagccaatccaataaatctaaaggagatgcagtccacacaaccttgcatgacttgtcatgtgagttactgttctggagagacaaactcaggctggaaacttatttgagatagcttatgaaaacaaagataatttatgataaggatacaggcactctcatacaatctaaggtagaaaaacagctaagcatcagaacaaactggaccaaagacttaaacacttctgctcctttgtgtaattggtttcatgcgtttctctctctcccttcctctctctcttttctctctgtggactaggtttttctacttttcatatacaaattttaaaaatacaatttctggccaggtgcagtgactcacgcttgtaatcccagcactttgggaggccgagggaggtggatcacttgaggccaggactttaagaccagcctggccatcatggtgaaactccatctctattgcaaatacaaaaattagccgggtgtgatggtgcacgcctgtaatctcagctacttgggaggctgaggcaggagaatcgcttaaacctgggaggcagaggttgcagtgagctgagattgtgtcactgcactccagcctgggtaacagagtgagaatctgtctcgaaataaatgaataaataagtaaaataaacaataaaaataaataaagacaattttaaaaatttcccaacattaagtgtcagcaatttggagagggacagctgtctcttgttctctctcttctccaattctcaattcctaggtctgatgctttccctggctcaactgactatggttgtggggtagggccatgaaacagaaatatcacattaggatccaacctttaattatgtagatggacagcagtttacagaaaaagtggtggggaggtggagggaggtgctgaacagacattctaaaagggctccaccaaagaaagctatttgttatatttatgaacattctggaaaattctttcaattgtgttcatgaataaattatgattggttaaaagctaacacacatgtagattatataacttctaaaatttgtatttggtatctgaatctatatattattttggcatgtatagaaaaatcccagatatttcaaaggctatcattagaaaaacgttaatgaaaaggttaatggaattctatatatttagttcctgtgagaatgtccagtttaactttcttaatcaactgatgaagaaacagaactgaaatcacaagattataaagatattttaacgatgcatttaggttttcattctaaatgctgaaaaaaggtatccctgcaaatactggttaagaaattaagaagtccaaaacccaataatgtagttggcagcctgttataaagatttagagtattcaaagataaaggcaaataaaaagactactttttataccagagtagaaacagtttattttcatgatcactactcttacttcaaatatatctattatctaagttgatgcttgcaaaaagtcctgattcttacacaaaggcagtcgattcatggatctcttagagagagagaaaaaaaaaaagctagttgggtgtgttacagttatatgaatcatgtaggatgctgcttaacgctatatttatcatggatgaaggcatgttttcaggggaaactatgagtctacctaaagttacccagttcacctctgttccaagggactcatcttttcagcattttgtttagcatgttacaaagtaccccgatgtcttctaaactattaggattgcaggaggaaactctcccagagctgctagaagtcatccttgaaagtttggatttctcccgaaaacttgtatttctatcattgttttaactatcttcttgaatcctcttgatcctgacctacatgtcctcttcccttgattgcatttaaatttagctgcatataaccttgctcttttccttctaatccaacctataaaccatatcaggggaggatatgtgatttgtcaattttgttgcctcacttcctcctcaagaactttcagtggctccattttacctctgagattaaattgcagccactcatcctgagttttggtgttccacaatctgacatatctagtcagctttgtgttctagtgtgtttgtgttgctataaaggaagactgagactagatagtttaataagaaaagaggttgatttggctcacaattctgcttgctggaagattgggcatttggtaaaagccttaggctgcttctattcatggcagaagagtaagcggagccttcatgtgtggaaatcatagggcaagggaggcagcaagggaggtgtggagaggtgccaggctctttttaacaaccacttctcatgggaactaatacagtgagaactcactgactctttctacagggagggcattaatttattcgtgaatgattctcccccatgaccaaaatacctctcattaggccccacctccaacattgggataaaatttcaacatgaggtttgaaggggggacaaacatccaaactatagcattctgctttggccccctaaaacttatgtccttctcacattcaaatacaatcatttcttcctaatagtccctaaaagtcttaacttgttccagcataaactcaaaagtccaaagtccaaagtatcacctgcgactcaaggcaacttctttacagctgtgagcttgcaaaaataaaaaatgaattatattcttccatgatacaatggttgtacaggcattgagtaaacattcccatttccctaagggagaaactggccaaaagaaagtggtaacaggtcccatccaagtctgaaacccagtgcggcagacattcttttttttgaggcagagtctcgctccgtcacccaggctggagtgcagtggtgcgatctcggctcactgcaagctctgcctcctgggatcacgccattctcctgcctcagcctcctgagtagctgggactacaggcagctgccaccatgcctggctaattttttgtatttttagtagagacggggtttcactgtgttagccaggatggtcttgatctcctgacctcgtgatccgcctgcctcagcctcccaaagtgctgggattacagacgtgagccaccgcgcctggccagacattaattcttaaaactccaaaataatttcctttgattccatataccacatcctgggcatagtagtgtgaggggtgggtcctaaggccttaggcagccccactctttggctttgctgggtgcagcccacgtgactgctctcacagattgaagcccaatgcctgtgcctttttcaggctgcagttgtatgttgctggtggctctataattctggggtctggagggtggtagccctgctcccacacctccaatagataatgcccaagtagaggctgtgtgtggttgatctgaccctatggcagacttctgcctgccttcccaggtgttccaataaatcctctgaaatctaggtggaagctgccaagcctccaacattcttgcattatgggcacctgcagatttcacaccatgaagccaccaaggcttaccacttacacccacctaagcagtggctcaaacagtacctggggccattggagccatggatggagccagagtggccaggatgcagacagcagcatcctgaggcagcacagggcagtggtaccccaggcttgtcctgcaaaattattttgtcctcctaggcctctaggcttgtgatgggaggagcagcctcaaaggtttctgaaatgcctttggggccttttttttccaaagtcttggctattagaacctagctcccacttagtcatgctaatatctctctagcaagtgtttggctgcatccttgaattcctctcctgaaaacactctttcttcatctaccacagggccaggctgtaaatcttccaaatttttatgctttacttggtttttagttacaatttacaactttaggtcactcatttgctgccatatctagtttacaatcatatttacaattaaaagcagtgtaaaccaaaaagtatctgagacaggtctcaatcaatgtaagggtttattttgcgatggttaaggaccatggcccatgacacagcctcaggaagtcctgagaacatgtgcccaaggtagttttgtgtagcttggttttatacattttagggagacagaagttacagacaaaaacataaatcaatacatgcaaggtatacattggtttggcccagaaaggcaagacatctacaagtgggggcttccaggtcataggtatattcaaaaatttcctgattggcaatggttgaatgagttaagctctgcctgaacagttgaagtcagcttgagttaagataaagaggttggctgggcactgtggctcatgcctgtaatcctagcacttttaggaggctgaggtggtcagattgccacctgggcaatctgtttgagatcagcctgggcaacatgatgagaccctgtctttccaaaaaataaaaaaattagatgggcatggtggagcacacctgtagtccttgctactcgagagactggggcaggaggattacttgagcccaggaggcagaggttgcagtgagctgagattgcaccattgcattccagcctgggtgacagagccagaccctgtctgaaaaaaaaaaaaaaaaaagtgaaagtcaaggttcttgtcatgtggatgaagcctccaggtagcaggcttcagagtgaatagatgatgaatgtctcttattagaacttaaaaggtgtcagactctctggaaaaaacttggtaagggagagattctctacagaacactaacttcctccacaagagacaacattgcagggccttttcaaaatgtcaaataaatatattttgggataaaatacttgtattgtattgtattgtattgtattgtattgtattgtattgtattgtatcgtatttttgagacagagccttgctctgtcatccaggctggagtgcagtggcacgatctcggctcactgtaacctccgtctccccagctcaagcgattctcctgcatcagcctcctatgtagctgggattacaggtgtccaccaccatgcctggctaatttttttgtatttttagtagagatggggtttcaccatgttggccaggctggtcttgaactcttgacctcaagtgatctgcctgccttggcctcccaaagtgctgggattactgggattacaggcatgagccaccacacctggacaataaaatacttttatttcctttaggtcttgctatgtcatgtgatgctatatcagagtcgggttcaaatttggtatcttattgctacaaagagtctgtcttgtcagtcatatgatctctgttttaatgttaatgctggtcatttgtgtctaaactccaaagggggagggtgtaataaggcatgttgggtaccctctcatcttgctatggcatgagctagtttttcaggtttctttgggatctccttgaccaaggggtccattcagttgattgggggagtttgaattttaattttgatttccagcagccacgccacttcttgaatgctgtgttgcttagaaatttcttctgctgctgggcatggtgactcatgcctgtgagaggcaggcactttggaaggctgaggtgggcagatcaattgggctcaggagtttgagaccagcctgggcaacatggcaaaaccccatctctacaaaaaatacaaaaaaaaaacaacaacaaaaaaacaaatcagccaggtgtggtggcatgtgcttgtagtcccagttactcgggaggctgaggtgggagaatgacctcagcctaggagatggaggtttcaatgatcctagatcgtgccactgcattccagcctgagtgacagagcaagatcctgtctcaaaaacaaaacaaaacaaaacaaaatttccgccagatatcctaggtcatcactcttaactgcagccttccacaaatccatagggcatggacacaacacagccaagtttttttttctaaagcataacatggaaccctttgctctagttcccagtaagtttctcatttccttctgagacctgctcagccttgcctttactatctatatttctatcagcattttggtcaaaaccacttaactaatctctaagaagttccaaactttccctcatctgcctgtcttcttctgagccctccaggttcttccaacctctgtccaatgccctgttccaaagttgcttccacattttcagttgtctttacagcaacatttcactacttggtaccagtattctgactttgtccattttgcattgctttaaacgaataccggaggatgggtcatttacaaagaaaggggtttatttggctcacagttctgcaagcctgtacaagaagcatggtgccaggatttgcttttggtgaaggcaaggaagcttccattcatggcagaaagtgaaggggagcctccatgtgcagagatcacatggcgagagaggaagagcgtgagaggaggggaaggtaccatggtctttttaacagaggtacaggcttttgagggaactaacagattgagaactcgctcactcccacccctgccagggaggtcattaatctattcatgagggatccacccacataacacacacatctcactaggccccacctccaacattgggatcaaatttcaacatgaagtttgggagggcgaacatccaaagtacagcaccttgtttcttgttgttttctaatatttgttctttatcccaggaaatggggggtaggaaggtgagttcttggtgtactctaagcagtcatgctcagcctgtactatcaaattttattccatttattcttctgttgaggcttgcatgacttccctaaggtacaatggcagagatagccacatgggtagtaaaatcaggggcagacagaccagctttctgccaggaatttacctcagggaaattcctcatctttgactttcctcgttctgacttttttttcttttaattccacctcctctccaaacctggcactattcctttccgatctttatccttgtccttactgttttgaagttggctcttatgcctgtttgtctttgcaatctgtctctgcgtcgcgtgttggtagtcatttatttttgtccctagtcatgattcccagaaccttgctgtggtcattttgatgccccaccctttgactattacaaaccaggagagctcatgcaagtggccacatgctgtagtggttaagagcacaggccccgtagctgaacttgaaactcagcatgacaacatgctggctgtgtgactaaggcaaattaaatgaccactctgtgtccttattttcttatacataaaatggagctacaatagtacctcctcatagggatgttgtgaagcttcagtgagttaatacagatataatgattagttatctgcctccattaaatccaatcatcaatactacccagctttattaaaacttctgacttttgttttggatgtggccaggtcctgaactgaattgttttttccaggtcaaatttaaatctaccctcctttcctttttctcaatgccaaattgttcttcagtttccatctctagccccataatctttgatttctcttgcccacatggatggttaccttttctgaaatgtcatagctcttacagtgctagccacctattttgatgccaaatctttacaccaaccagtgttatcacttaatcaattcttacatctatgtcttaacttctccaaccaaacttaagacttgttggtgccaagaatcaaatctcatacttttgagttattcaaaccatacagaacagtagatactgaataagtatttgtctgaatgaattgtttgaataacttaaagagcctagaagcggctgggtgcgatggctcatgcctataatccgagcactttgggaggctgaggcgggccgatcacctgaggtcaggagttcgagaccagcctgacaaatatgatgaaaccccgtctgtactaaaaatacaaaaattagccgggcatggtggcatgcacctgtaatcccagctactcaggaggctgagacaggagaatctcttgaacccaggaggtggaggttgcagtgagccaagatcacaccattgcactccagcctgggcaataaaagcaaaactccatctcaaaaaaaaaaaaagagcctagaagctttccagggtggtcttgggggtattggctttagaagaggaagcttgatagatgaaaatttccagatcaacggcattttatgtacttctcagaaacaaggtatgactagactgaaagatctgaagtcaggaagaaacttcttggtatcagtctgtgcccttaggaagaagtgaggtcataagctctattagcacacatagctgaaaaactgaaagaggatgtaagagaaaggattgttaaaaaacaaaaacaaaaaaacacaaaaaaccaaaaataaaaaatctgggtgaggtatttgcaatactagagccaaagaatttgacctaagaggccgggcgtggtggttcacatctgtaatcccagtactttgggaggccgaggtgggtggatcacttgaggccagaagtttgaaactaacctggccaacttgttgaaaccccatgtctactaaatacacacaaaaaagggcccggcgcggtggctcgtgcctgtaattccagtactttgggaggctgaggtgggaggatcacctgaggtcaggagatggagaccatcctggctaacatggtgaaaccccgtctctgctaaaaatacacaaattagccgggtgtggtggcatgtgcctgaagtcccagctacttggagggtgaggcaggagaatcacttcaacctaggaggtggaggttgcagtgagctgaggtagcgccactgcactccagcctgggcgacagagcaagactctgtctcaaaataaacaattaactgggtgtggtggcacacacctgtaatctcagctgctcctgagcctgaggtgggagaatcacttgaacccgggaggcagaggttgcagtgagctgacattgtgccactgcgctccagcctaggggggagaaaaagaaaaaaaagaattctgatccaggcactgactcattgagcaagtcatctttactgttcaggcctcagctttcttcctttgtttttttttgagacagagtctcattctattgcccaggctggagtgcaatggcatgatttcagctcactgcaacctctgccgcccgggttcaagcaattcttctgcctcagcctcccgagtaggtgggattacaggtgcctgccaccgcgcccagctaatttttgtacttttagtagagatgggggtttcactatcttggccaggctggtctcgaactcctgacctcatgatccacccaccttggcctcccaaagtgctgggattacagatatgagccaccgcacccagctaggcctcagttttctaatgtgtaaaatgaaaatatgcactagaccttcacttgtttttttctatgtgataattttttttaaaaaaagaaggtgtcatgttacattttatctttatgtttacatttcatcttgtaaggttgcctttgagccttgacacagtgatttttctcattcaactagtttctctcccatctcaactagtgacctcaccatccactaattgtttaagccagaaattgggaacttttccttggttcctcttccttgtttacttcttccatctaccccatgagcaaatcctatctgttcttccttaaatttagttcccagatctatctcctgcatctcaggtctatgtacttcttcccatctcccctgctactagtctgtccagagctacaaccacttcccttatagattattggaataaccttcttattggtcttcatattttcactctgactcccctctgatcaattttctgcaatgcagccagaattatcttttaaaaatgtaagtttgagccaggcacagtggctcacgcctgtaatcccagcactttgggaggccaaggtgggaggatcacctgaggtcaggagtttgagatcagcctggccaacatggtgaaactctgtctctactaaaaatacaaaaattagctgggcatggtggtgggtgcctgtaatcccagctacttgggaggctgaggcagaactgcttgaacctgggaggccatatatatataaagtttgatcacaccactgtcctgcttaatctttttttattttttaacttttaaattttttaagagaagggtctctctgtgttgcccagactggtctctaattcgtgggctcaagagatcctctcatcttagcctcccaagtagctgggaatacaggcatgtgccaccacacccagtgactttccttcctaaaatgcttcaatagtttctttttctttttctttctttctttttttttttttttttgagatggagtctcgttctttcacccaggctggagtgcagtggcgtgatcttggctcactgcaacctctgcctcccgggttaaagtgattcttctgcctcagtcttccaagtagctgggactacagcatgtgccaccacacctcaataattttttgtatttttagtagaaatgggtttcaccatgttggtcaggctggtctcgaacagctgagcttgtgatccacccgcctcggcctcccaaagtgctgggattacaggtgtgagccactgcacccagccacttcaatagtttctttttgtgcttaacataaagtttaaattcatgtccagagcctataaggtgtcatatgaccaggcccctcaaggtatatccacttcactcaagccatgtttgtctcatcttaattcttcaaacaccccacattctttcctaactcaaggtctttgagcttgctgcttcttccaggtggactgatcttagcccttccctttgttgttgattttttaacttttttttttttttttttgtgagaaagtcttgctcttgttttccaggctggagtgcagtggtgcaatctcggctcactgcaacctccacctcctgggttcaagtgagtctcctgactcagcgtcctgagtaactgggattacaggcacctgccaccacacccggctaatttttgtatttttagtagaaatggggttttgccgtgttggccaggctgatcttgaactcctgacctcaggtgatcctcccacctcggcctcccaaagtgctgggattacaggcatgagccagcgctcccagcctttttaccttttttttttttaatttcaataggtttttggggaacaggtagtttttggttacgtgaaaagttctttagttgtgatttctgagattttagcacacccatcacctgagcagcgtacactctacccaatgtgtagctttttatccttcacccccccaagtctttccctgagttcccaaagttcattgtatcattcttatgcctttgcattctcgtagcttagctcccacttacgagtgagaacatacaatatttggttttccattcctgagtctccaattccacccaggttgctgtgaatgccattaatatgttcctttttatggctgagtagtatttcatgatatatatatacacacacacacacacacacacacatatatacacacacacatttatatgtgtatatatacacatatatatatatgtcacatttctttatccactcattgattgatgggcatttgtagccctgccctttgaatggctgacttcttcttatgcttcagaattaatactttgtaattacattaatatgttttttttaaaaaaaaaccttttacatatatattggtctgtcacaataatgtataacaatattatagtttctgttttaatgacttaactttggcaaactggtcaatgatttcattaaaactgatctttttaaaaataatcagcttcaatagacagtttaaccagatttgtcaactttttgtttttggcacagtctcactctgttgcccaggatggagtgcagtggtgccatcttggctcactgcaacctctgcctcctgggttcaagtgattctcatgcctcagcctcccgagtagctgggattagaggcacctgccaccatgcccagctaagttttgaatttttagtagagatagggtttcaccatgttcgccaggctggtctcgaatgcctgacctcaagtgatctggctccctcgaactcccagagtgctgggattacaggcgtgagccaccacacccggtctccataaaaaaatcttaaacaaaaggatatggttggtgaaatacaaatcctattgcgcagtaattttcacaaattttaaaattgacaataccttcgcttctttcagatcaattatagtggctttcaaatgtcatcgctcaaaaaagttcaaatgtcatcgctcaaaaaaaaaacaaaccttcactagaaaattaatcataaattgatggtacagactgggtgcagtggctcacaactgtaatcccaccactttgggaggccgaggtggatggatcacctgaggtcaggagttcaagaccagcatggccaacatggtgacaccccagctctactaaaaaaaaaaaaaaatgaaaaaattagcccggcgtggtggtgcatgtctgtaatcccagctacttgagaggctgagacaggagaatcgcttgaatgcagaaggcggaggttgcagtgagtcgagatcataacactgtaatccagcctgggcaacagagggagactcctcaaaaaatataaaaataaataaattgatgttacatttggaaaaactgctgaaattttcttcttctgcaaaaagttagaaaaaaccactgaatgattgaaaacattgacattatttaattctttgctttagagcaagtactcagttcttgattgaagtgattgagggattcaaacattgtccttttgttttcttccggtaacgtcagaccagcatattttgttattgctgctggctgttttcttcaaaatttgctttgaaaaagatgtaaatggccatttccttatacttgtgattaaatatttgttggcctttccaccagttctctgcactgatcttcaagaaaaaattttaaaacctgcacacaaaattttaaagactgaacacagaattttaaagcatgcacatttttcaaagctgtttctatctctttggaagtttgtgtctgattaagttcatctaagacttcactccaggaaaaaagttaacccagaaaagataaatagcctcagcagagagaaaaatctactgattttcttgtgtctacattttgttttagatagcataatacttcaaaagttggtactcatttcttaaactttactgtgtgcatagcttcaaaatgaatactttgttgtgtgtgggaaagccttttcattgttatacttacaatcttcagcatggtccatccgtgaatcttttttaaaattgataaaaaggccaggcgcgatggctcatgcccgtaatcccagcaccttgggaggccaaggcaagtggatcacctgaggtcaggagtttgagaccagcctggccaacatggtgaaacctcgtctctactgaaaatacaaaaatcagctgggtgcgttggcgtgcgcctgtaatcccagctactcaggaggatgaggcaggagagtggtttaaacctgggaggcggaggttgcagtgagccgagattgtgtcactgcactccagcctgggcaacagagcgagactccttctcaaaaaaaaaaaaaaaaatggttaaaaagatgaaataaaaattttccaagttcccctcaacccccctaaaaaaaaatcatacatgaagaaacatttccaaaacagtggagtttggagattgatttgcacaagcacaaatgaggatttaggataaatttctttgacttttacctgaacactacagtcagtcttggccatagtttcagcattgccatgtccttggtcatgatagaggttcatgtccagcatatcacaattcagtcatatggtgactattatgtgagttcaggagtgtttatcctagaaatagaaagacacccaggaatgactcctttctttcaaatttgctgttctcaaaatgaacatacttaaggactttacatttgatcagggtataaaccactgggaagactaagtgctcagaaaaagaaccaaagacttggagataggaacagagcctgaaatgaacagaaactattctataccccccatgaacctagaaacaaatgtgtatagctaagcgtattagtccactcgggatgctttaacagaatatcaataaactggaatgcttcacagtaaacatttatttctcacagttctggaggctgggaagtccaagatctggtatctgctgaggttcctcttactggtttgcagatggccgtcttcttgttctatcctcacatggcagagagcagagaacagaccatctcttgtgtctgttcttagaagaacattaatcctatttatgagcactctaccttcgcaaccaaaaggcttcatctccaaataccatcacttggagatttagccttcaacacaggaattttgggggtacacaaacattcaatccatagcactgagtctgtatgtgttgggaactgattgataaattggaattcttcaaattaacttacatgtagaatacagtatttattaaaggataagtaaaaagaaatgtgttaatttatagtgtatttattattattaaaagtctatagggctgggcacagtggctcatgcctgtaatcccagcactttgggaggccaaggtggggtggatcacgaggccaggagtttcaagatcagcctggccaagatggtaaaattccatctctactaaaaatacaaaaattaattgggcatggtcaggcgcacgcctgtaatcccagctacttgggaggctgaggcaggagaactgcttcaatgaacccgggaggttcattcaagatcacgccactgcacttcagcctgggtgacagagtgagactctgtcttaaaaaaaaaaaaaaaaaagtctacagtaactgcaattgtttagaatttaagccaacaagatatgttttcttttccgggagttgtattttttatcactgattgtctacaattgacagtgcatgtcaaaaagcagacttgtcgtgctgcagtggctcacgcctgtaatcccagaactttgagagggcgaggcaggaggattgcttgagcccaggagttggagaccaacctgggcaacatagtgagatcccatctctaaaaaaataaaaataaaaccactcatttttgtcaattttattactgcttttaatttttctaaagacgatgtgctgctccagctctgggtacacacatgcccacgagagcaagctcatgagagaagaaactacatcccctctatccacctatatttctaacgccttgcacagtagctggcacatagtggacatgaaataaatatttgtggaataaataagtgaagaagaattttagaatactttataagaaacaataaatcttcagagatcaacatttcaaattagtaactttatttacaaacctctcttctgggttttattatttactacaagtgcttgcaagacctgttattgtacactcatgtattcctatcaaaggtaatcatcagacattatatttcattaaataatttaatggtgctttctgttctttattcattaatttttttgtgtgtgtgtgagaatggagtttcactatgttgcccaggctggccttgaactccagggttcaagtggatcctcctgccttggcctcccaaagtgctgggattacaggcatgaaccaccatgtccaacaatgttttctgctctttagtaagtctagccatattaaattttatgtgttttttttttcttttttgagactgagtctcactctgtcacccaggctggagtgcattggcgcgatctccactcagtgcaacctccgcctcccagtttcaagcaattctcttacttcagcctcctgagtagctaggattacaggcacgtaccaccacatctggctattttttttttttttttttttgagacgaagtctcactctgttgcccgagctggattgcagtggcatgatcttggctcactgcaacctccacctcctgggttcaagtgattctcctgcctcagcctcctgagtagctgggactacaggcatgtgccaccatgcccggctgatttttgtatattttttaacagagatggggtttcattatgttggccaggttggtctcgaactcctgacctcgtgatccacccaccttggcctcccgaagtgctgggattacagatgtgagccaccgagcccggcctaatttttgtgtttttggtggagatggggttttaccatgttggccaggctggtctcgagctccggacctcaggccatccacctacctcggcttcccaaagtgctaggattacaggcgtgagccactgtgcccagctcatattacattttaaatggaggtagaatatcaacctgaattcactaagagaatgcaggacaaattgccctgatatcctgacacaaaggtgaagcaggacttttttgtaatttgaggatttaaaagcatggttgctccaggccaggcgtggtggctcctgcctgtaatcccagcactttgggaagccgaggcaggcggatcatttgaggtcaggagttggagaccagcctggccaaaatggtgaaaccctgtctctactaaaaatacaaaaattagctgggcgtggtcaggcgcctgtaatcccagctacttgggaggctgaggcaggagaattgcttcaaggaacccaggaagcagaggttgcagagcccatatcgtgccactgcactctagcctaggtgacagagcgagaccagcctggccaacatggtaaaaccccgtttctactaaaaatacaaaaaattagcagggcaagctggcgggcgcctgtaatcccagctacacgggaggctgaggcaggagaatggcgtgaacccaggaggcggagcttgcagtgagctgagatggcgccactgcactccagcctgggcgacagagggagactccatctcaaaaaaaaaaaaaaaaaaaaaagtatggttgttccagtcctgggaaattgaaatagggggtaaaaaggctggtgggtgtggtaggcagaataattacttcttccctctcccaagatgttcaggtcctattccccatcctattccctggaacctatagctagattgccttatggggcaaaaggaatttttcaagtgtgactaaatttagaatcatgagttagagagattatcctggattatctgtgtgggtttaatgtaatcacaggggtccctagaaagaaaagagggaagcagaaaagccaaaggagatggaatgatgggagttgagatcagtcagatttacagatgcaatattgtttcctataaattctgtggtgaaagaaatgctatattgttgctggctttgaagatggaggaaggggctgagagtgaaggaatgcaagtgaccttaaattggaaaagacaagaaaataattggccctgtagaggttataaaagaagggtggtccttctgacacactgattttagtccgatgagattgattttgaacttctgacttccaaaaactgtaagacaatacattagtgttattgtaaaccactacatttttggtaatttgttacagcaataggaaacttatatagtgggccctgggatccatctgccctagccgtttatctaaaacaaaagatcttatagggaaagcaaacaaacaaacaaaaaatacagaaacaaagcaaaacaaagcacccctatgctctgagcttgggcctggtaagggcactatgagcccatgatttagcatgttgctgggaaatctccttccccctgttgagttgccagaatcgtggaagcagatggtgtgggggattcaggctcctccactgcttttctcagccagacctttgaggagagcttggctgaagtcttccaagctttatccccttgtagccattgttttgagccatctcaaacattaagtagctcttgagggttgaattgagtccttcctaaagacagactaaagtcctagtctccaggacctgtaaatgttcccttatttgtaattaggatgtttacagatgtaatcaaattaaaatgaggtcataccggactagggtgggctctgatccaatatggccggcatcctcataagaagaggagaagagacatagacacatagggaaaagaccgtgtgatgatggcagagattagagtgatgtgtttacaagccaaggaatgtcaaatattgccggcaatatcagaaactaagaaaaaggcatggcacagattgtctctgagagcctctcagagagtatggccctgctgacaccttagtttcagaggtctagcatccagaactctgagagaacagatttgtgttgttttaagacacccaccatgtggtaatttattacagtagcccttaaactaacacagtgaccttgtgtcttctgccagagggatttgatcacactggtgaggaagggtcctggtccataataacccaaatttctgccagggaagaggagattgaaaggtcccagtgatcttggcctatttacttgggagctcttccacagaacaaatgaactcctgaagatgagctgctacaaggattctgtgctttggacagaattgcacttgtctcttccccctgctgtcactccctgactaggaaaggtccaagctgtgaaggaatcccccccagaagagacttgtaagcattaaagacctgtggaaaactaagagggagggtggatagaggagtctggagaccgactaaccttctgagctgcttattgcctgaagtgggggtggagtgggctgcaaacactgttgtatttgggggacacatcacagatgcttatttgcaccttggactttgtcaggacactctggttacagcacaactttgtgaacatggatcacaagatacttggaaaagcagtgtttgcattaatcagattaggattagctaaaattttaattaaagaaccagagagtacttcagaggcaaggagatgatagttacctgggattacttgctatttgtgaaaccaaccagctgaccacttgtgttgtttgtcccaaggtataataataactagatgtttgcatattgtgattgtttctgttcggatttaatggctgatctatttatcatattaaaagagggatcaagttcaaagatttcaatgctctttatcttctttctatatatgatatttatttttaaatgtccatattaaatatacatatatacacacgattctcagaattacgaagaatgtgctgtgtagcattcaattatatatataattttttttttgagatggagtttccctcttgttgcccaggctggagtgcaacggcatgatctcgggtcacagcaacctctgcctcccaggttcaagtgattctcctacctcagcctcctgagtagctgggattacaggcatgtgccaccatgctgggctaattttgtatttttagtagagacggggtttctccatgttggtcaggctggtctcgaactcccaacctcaggtgatccaccggcctctgcttcacaaagtgctgggattataggcgtgagtcaccaagcctggctccaattctgtatatttttaaatgtaagtataaagatcaaagatacaaagtatattcacatatcagtttccatgttgttattattattattatttgccattttaaccatctccagatgaagaaaactgaatgtaaagttaaatatctccttaacttttactctatttaaaaagagactgaattatttgtgaggtaacccagttgtagctgttctactcttctctactgctagattttggaagaaccaaaaaggaataaagcaaagcatgacacagaagagaaagcagaattatactgtagtagtatgctcatattttatcagagtttgcctgtacttttgctgatttttttttctcctagcttggacattttaaaggcttattttaaatttatctcttctgtattaacaggtgagaagtggacaaatcaatgtataaaaactactatggctatcatcatttagaattttgtcttaaaagtaattggatttctggggtcctagacacataatgattagagatcatgccaccagttctatatggagccatctcaattcatcctttctcaatttatcctttccaggcatttttcttgaaactgcctaagtactggcgtctccctacgactattatatctgaaaacacattcagttttcaaaccagctgaattttatgcctgactattccttttaacttataccaatgaaaatcctttaataaattcactcacaattgctccactttctcaaacagagcacaaagcatctaacaatatttcttcatgattgatagcatacacactcttgacttcatattcttcaaaatcttggtatttttataagcattagtgccttttttttccccagtcagaagcactgacggatttattctattgggtgttgtcttctgtttggtctttagcttttcttagctgtgatcgtttattgctgaataattaagggcaattctttcccactgaaatacttttcaagttaaacattttttccttaaatttttgccccaggctacttctagatccagcgttgttccagcttactgagcattccagagggctaaggtccaagttagccaaggttttaaaatgttgaccatgtggacctgaattctttccagttacatatttgcatacttttaacaggagtggttatttctcgtcaaaagacagaacgctggaaataccagggcaaaactatgtgtttttttcttggtgatatcttgatcttagcattttactctctcttcctggtttctagcttgacctttgtattttagaggagagtaatagagtaacagtgcactgagaagcaatgggacatgacagaatagtttcagcagtgaaagtcagggaagctggtttcaaccattcattcacaagcttaaaggactttggtatctgactttgtggatgccactttctcatctgtaaaataagggggttggatcgtgtgatttataaggggctttcttactttctaacattccatattctataaagacagttaaagtctccagagagtaaagaatgtagaaaattcctgaaatttactcagctcctttattcctaaatatttttgaattctgaaattattattattattattttttgagatggagtctcactctgctgcccaggccaaagtgcgatggcacaatctcagctcactgcaatctctgctgcccaggttcaagtgattctcctgcctcagtcttctgagtagctgggattacaggcatgtgccaccatgcctggctaacttttgtattttcagtagagaaggggtttcaccatgttggacagggtagtatcaaatttctgacctcaagtgatccacccgcctcggcctcccaaagtgctggagttacagccaaagcacctgacctgaattctgagttttgattctgtttttttttttttttttttgagacagagttttgctcttgtcacccaggctggagtgcaattgcacgttctccgctcacagcaacctccatctcccgggttcaagtgattctcctgcctcagcctcccaagtagatgggactaccaccgtgcctagctaataattttgtgtattttagtagagatgggatttcactgtgttagccaggatggtcttgatctcttgacctcgtgaccctccctccttggcctcccaaagtgctgggattacaggcgtgagatactgcgcccggcccatactcacagatttctttgtgatattatctcatttgttttcaccacacccagatgatgtggatggtaggagaaatcccatgcgaataagtggaatatgttagtaactgcttccttgggtccttttgcctctggacttaactctttttttttgagacggagtcttgctctgtcacccatgctggagtgcagtggcgcaatcttggctcactgcaacctctgcctcccagattcaagcaattctcctgcctcagcctcccgagtagctgggattacaggcatgtgctgccacgcctggctaatttttttgtatttttagtagagatggggtttcaccatattccccaggctggtctcaaactcctgaccttgtgatccacccaccttgaccacccaaagtgctgggattagaggcatgagccactgcacctggcctggacttaactcttaaatgatgttacccaggaaaaccaatctatgactaaggcaaaaaaaaaaaaaaaaaaaaaaaaaaaaaaagttgcacagagaagagtggaaatatcagtaaatcagaagctaggcaggcctaatccctaatccacttggtgaccttctgcaaaacacctttctgttagccttttcacccgtgaatttttttttttttttgagacggagtttcgctttggttagccagactggagtacaatggtgcgatctcagctcactgcaaccttcgccttctgggttcaagggattctcctgcctcagcctcctgagtagctgggattacaggaacctgccatcacacccagataatttttgtatttttagtagagatggggtttcaccgtgttggccaggctggtcttgaactcctgacctcaggtgatccaccttcctcggctgcccaaagtgctgggattacaggcgtgagtcactgtgcctggcttacttgtgaaattaaagcttcaacttttactccttaggaacgtctcacaaatttccacacataaatctaaagtagacactcctgcttgccaaaagcatactctctaaaacattggttctcagacggacatagtggctcatgcctgtaatcccagcactttgggaggccgagacgggtggatcacttgagatcaggagtttgaaaccagcatggccaacatcgtgaaaccccatttctactgaaaatacaaaaaaaattagccaggtatggtggtgcgtgcctgtaatcccagctactcgggaggccgaagcaggagaatcacttgaacctgggaggcggaggttgcagtgagccagatcccgccactgcactctagcctgggagatagagcgagactctgtcttggaaacaaacaaacaaacaaacaaacaaaaaaattggttcttgagcagggcaatttcacctccaaggggacatttgacaatggctggggacatttttggttgtcacatctggggttggggagtgaagtgctattggcatctaatacgtagaggccagggatgctgctgaacatcctgcagtgcacaggacagcccctgacagcattaaacagtccaaaatgtcaattgttttttgaggttgagaaacgctggtctaaaagaaatgacaggacaggtggcttggctcatgcctatcatcccagcactttgggaggctgaggcgagtggatcacctgaggccagtagcttgagaccagcctggccaacatggtgaaacctcttctctactaaaaatacaaacaatagccgggcgtggtggcccacacctgtaatcccagctattcagaaggccaaggcaggagaatcgcttgaacccggggggcaaagattgcagtgagctaagatcatgccactgcactccagcctgggtgacagagtgagactctcaaaaaaacaaacaaacaaaaaaacagaaatgactcaaatgtttacagtgattacttctggatgggattatgataattgtttctctactgttctaaaaaactttctgttctttccaaatgtttaatattgagcacttattttacaatcattaaacaaagaaatgacaacaactgttaaaaaaaaattcttaagaactgaaaggcaaacaccaccaccactaaagccatgtcccccagatctaggttgtgagtcacatgataccgacttcagaggcagcatgtctcaaggcctctccaatgtgtgtcagggacagcagtgggagtagggccctctgagtcagcctctttgacctgggatgctgcaggagatcttagcaaacattcaagattttcactgagtcatttgcctgtggcattgatctgctcactcaagtcttccggtgttttggtgtgagggaggctaaagaggaaaaacagctgtttagtttctcattgatttgtattgtcattgagcaatacctggagcccaagtggatgtcttttattctgtggcctccacagctgggtcagtgtggaaggcttcagaccatgagaaattgttcctgggagtcaattattttaataagtgagatatcagagtatattcacagaaagaggcttccctggcactgtaagggcagccaggaataaaataaaaatgcttcttcagtgaagataattgtccaaattgaagacataggaaatatttctaatttgcctgtgtatttggtgaacatttctctctctctctctctttctctctttctctctctctctctctttctgtctccataaatgaagacatgggaaaatctattaaaaattaaattaaaatgcaacacttttacataaacaaaattcccaatcactctccttactttacctcagcccaaccaaatgtgagttaaatctcttccctttcccatgggacactagcatcttggtggcccagctcagtagctaagcatagagtaatgagtttgttaaataatttcaattacattgtttttgagattccagggtcacagggaaattctgacctgaattatctggatgaactctcacaattgtgcactgccttgttcaaatttgggaagtgctgagaagcactcatccaaggggtagatctggacttcagctcatgcagcataatagaatttcaggctcagtgatttctaatctgttaccacttgccattttctacttgaagagggcagacaccttcactgatctctgtttctatttcatcttttgaaaaatcgggatgataatggttatctggtttacatgcttttacatgcttgtcaggagttattttaaagcactttacaaatataaaaatgtacaataaaattgcagagtcggatgcagcaacccctgtatcctttgaggaatctatcacaattcatacccctcccaagccaacttttctggtactactctggaaaattgtgcttatacagttaaaatttttattttcaaaaagttgtgtaattccctttttcaaccatttttttttgttataagaaatgcaattaaaaacatacttttctttccaaatagaagagcctattctgccttataagaattgtttgaaagattgaaggacaaatgaagtcatacaacttctctgataccatattgaactcaaatgaacacattttgaggtaagaaatgagcctggaagatttttcttttttttttttttgagatggagtcttgcttcgtcgcccaggctggagtgcaatggcgcaatcttggctcactgcaacctccgcctcctgggttcaagtgattctcctgcctcagcctcctgagtagctgggattacaggagtgctccaccaggcctcactaattttttgtatttttagtacagatgggttttcaccatgttggccaggttggtctcagactcctgacctcatgatccacccgccttggcttcccaaagtgctgggattacaggcgtgagccactgtgcctggcaagagatagaatttttcacaaaaataactcataccagaaactttgtaggcccccaccgatgcccataatctttaggaaacaaactctagtgtcacctatttcctgataccttctgtaacgaccaggtcatattctgagttcctacagcactcagtgtttctcatcggagctgtagcaatggagtaataaatggcactgctcaggaagagagaattcagaaagaaaagagcagggcctagaaaaggaacaaacttatcggatgtgtagagaaagaatctgcaaagcaagtaataaaatccagaaaaacgtggtatcatggtggtcacaaaaaaaagagtggttaaattttcgaaaatggagacaaaccactcaccatgatcgtgccatctgaatagaaacacagaaatgatgacaaaaaaatggctaaagaaagaaggtcaacaaccatgtccaatgctttggatattaagaagtgttcagatggatttagcaagtagaaagtcactgacacttggtgcacaaccagacctcaatgtatttaggaggaaactgttattttggaacaattgaaagctttcatttggctgagaaatatcaactcattcttaaataggtatgttagaaggagcctctgggcctgatatctccttgattacaaggaaaatgaataatagttgcgtctgataaccatgacatatcacccctatgtttgcttgtagctttcagcagctcagaacattgttgaaaacactcattatcccaatatccccaacagggaagtgttaaaacctgccttgtgcaactgtcaatctctgatgattagataaaaacaattatgtcatgagttgtagctattgttatttacttcccaagagccagattacacaggtatctgattgctgaagcaatgtctggatgtaccacgaaattccacatgcatgtacagtataaacacctctggctatcaccttatctaattttgatcagatacaggttaatcccctcctgtatctttatatgtcctgaatttgcctcatccacctgaactttgccataatttactctcaatttgtatgtgtctgtgatggagttgttgtcattttccttttctttttcttttttttgaggccaagtctctttctgtcacccagactggagtgcaatgacgcgatctcagctcactgcaacctctgcctcccgggttcaagtaattcccctgcctcagcctcctaaatagctgggactacaggtgcatgccaccatgcctggctaactttttgtatttttagtagagacggggttttaccgtgttagccaggatggtctcttgatccgcccgcctccgcctcccaaagtgctgggattacaggcatgagccaccgcgcccggcctcattttctctatctgtctgcttaatcaggttttgcaagtttcacatttcctcaactaaacttcattttaccacccaagcaaacttcattataattattttatttttctgatgacatcagatttctgtaggggtacctattagctagagatacttagattttattttcccagcatgtgactatttcccattctatacaacacaatggcaagagcaggagtatgtttttggacaattaaagagagaaaaggccgggcgcggtggcccatgcctgtaatcccagcactttgggaggctgaggtgggcagatcatgaggtcaggagatcaggagattgagaccatcctggctaacacggtgaaaccccatctctactaaaaatgcaaaaaattagccgggcgtggtggtgggcacctgtagtcccagctactctggagggtgaggcagaatggcgtgaacccgggaggcacagcttgcagtgagccgagatcgtgccactgcactccagcctgggcggcagagcgagactccgtctcaaaaaaaaaaaaaaaaaaaaaaagagagagagaaaataactcagcttcatttagatttctattattcttctctgatccatatagtggatgttcacagaagtgtaggaaccaaaactatgcaagttaaactgttaattttagaagtttatagcagtgatgtggaaggctgaccaaagttggcgctttggtctcactataagccatagtaataaatacattaacaatgtccacaaacaacagtagacaccatttagtaagggcttgctccaagccaggcactgttttcagcttaagtctcacagccttgtgaagtagattctgtcccatcttagagcaagttggtctgaggatcctcaagggtaaggtctcttgccaaaggtcagcagaggtagtgagttcagaactgggatttaaatccaggctgttctatttctattccacaattctgcctcaactgcttctctacattttaggcacacgtttgaatactgaaaatttgggtcacagagttggagatgtttcttcttctaggccccaaaccggagcggggtgcagtggctcaagcctgtaatccgcactacttgggaagctgaggcgggaggatcgcttgagctcaggagtttgaagatacagtcagctatgatcctgccactgcactctagcctgggcaacagaacaagatcctatctctaaaaaaaaaaaaaaattaaaattttaacacaagggcccaaacaagtcaacagtaattacaacatgatctttactactgtctaataacatctcacagtgctttaaacatacgtagttaccattctgtccacttggttgcctgtaatattaactcagtaagtaggaatacttcctgccctgactaatatactcataaatatatgctctaagtcaagggtcttgcaggttctgatttaaaaaacacaatttttttgagggtcactggctttacattatctcattcttttcaagttcctttgtacgtaaaacatcctatgctcagttatatgatctgttcaacctcctgcttgacagatatgaaaacagtgctctcatgtaatttatgtaatttacatttttacatatttagcagtacacctttgtgctatgttatattgtttgagaactaatctgtttttctgatggctggaagtctaagtgaaaagattatacatgaaaataattcatgtttattatcactaggagaaagtaagacaatttagtttgattcacaagcatttgaatccctattgtgtcagacattgtattggaaactggggatacaaggaagatataacctcatctctcagagttccctagttatcccatacatatatacaattattatttgtcaattaaattttttttaaaaatttagaaaggagtttccaagtaagaaaaatcatagcgaaatggtataattggtataataacagttaattagctatagtatgaaaatacagaggaagatctaactaagttggggattattaaagaaaatttaaattagctgggtgtggcggcagacgcctgtaaccccagctacttgggaggctgaggcaggagaattgcttgaactcaggtggtggaggttgcagtgagatgagatcactgggtaacagaacaagactccgtctcaaataaaataaaataaaaaataaagaaaattggacagagatgtggcatttgaactgtctttcagattaagaagaaagttactagttagccaattcaaatataagatttacaaacatagagtacagcatgagcaaaggtgtggaggtacaaaaagaataatgtttttgaggggagaatagcaagtactctgggggtggccaaagtttgagttgtgtggttttggtggtggatggagatgcaggaagattaggaagtagattgagatcagattgagaaaggtcttccagaccagatgaaaaattttgccatatttaggcaatagggagccccagaaattgttcaaccatcatcagctttacatttcactatggtaatttggcttcataagaagcatgggttggagattgataagagcagactccaaggggccaattcattaaactcaactgccaataatgcaagagacaatgaaagccagaatgaacacagtgaccatggatgccagaggcatttctaggatttttgtagaggacttaagagaccatttgggaggggaggaaggcagaagataaggggaaagaaggagttgatatctttgatgactgatggcacttttgctaagatgaagaataaatggtagcaagaataaattgactgggcgcagtggctcatgcctgtaatccaaccattttgggaggctgagatgggtggatcacctgaggccaggagctcgagaccagcctggccaacatggtgaaaccccatctctactaaaaataaaaaaaattagctgggcatggtggcgggtgcctgtaatcccagctattcgggaggctgaggcaggagaatcgcttgaacctcgaaggtggaggctgcagtgaacgagatcaagttattgcattccagcctggacaacaggagcaaaactctggctcaaaaaaaaaaaaaaaaaaaaaaaagtataaattgggggaggggaggagatataggattcctattggaatgtattgagtttgagattccagcctggacatatggcactcttgaattgtttcctaggcgatcatatcactgtcttgatgatatctttaatcacacatatcacttgtggggaaagaagaaacttcaagagttttacacaccaatcctttactttgccatctagacaaattatatttttaccaatgccattttttgttgttattttgtgggttctgcttaaaacttcccctatatttttctaattatggtaacctagggaaaacatcaaattatgttgataaaattggctacaatctggctctaatgataatagcttagaatcatgaagcagcaatattttatcctgagagcaaacaaactttatcctgaacacatgtgttcttttgccttattcatctaatattacttgaaacttttatttttccactttgaatagtagattctgccaagtgttttaaaagcttttctctttttaggggaggaggggaacagcttttctcccttttgtctgataactgaggagtgaagatttaattggtgagaaaaatatacacactataaacctcagaatgttcccactgcttttaatgtttgatgtgcctgacagattaccctttcaaaacagataataggataggtggtgctggaaaaaaacttttccatccaagacaaaaccacatggacattgaaaagaactggcatttgcctagacatttagtgggggacatgtccttagggcacagattccatagtgaaaggctcttctcccccttccacacactccagctctctctagaaggtataatggaaagaactctgagcaagaatcaggaagttggcctttgttcctgactgtgccactttgtggaactgggcagaacttacctcattctgtgctttagcagcttcatttgcaaaaattaatgattacctcaaatgatttctgattttagccaaaattaaatacagtagttttaaaacaactgctacatattaactacttacgtatgtaattttgcactcaaaataaattatattatggaaaagaaactcaacctatgttaaccatccctgtactgatgaggaaactaagacttaggaaaaagaagtgatttactcagtattgggcagttagtgagcatttttgagccaaggtcttactttaaccagagacctttgcataatattgtactgttactaaacactttctattatttgactagaggaacacaacatattgatgcatttgaaacaataaaataataaatatttttccttaccctcggcagaaacaggatgatgagaaacattgactaaaaatttaatcaagccttaaggacaaatagtatcacagttttgaataggagattgggtaccttggaagtaattatgaagaggtgttttaactcagcagtaggctctttcttattcctgctaggaatgaagaagcacaaattgaaagtgaagaaggaggaaataaaacactgactctatgtgtaagaaaggtgacttgcaaattatgaggcagttaggaaaatgtttattttttcttattttataggctgtatatatttgagaattaataattgtcctttggagggtgtgtgtgtatgtgtatgttggagctttgtgtgtgttttagtccattttcctactgctatgtgaagaaatgcccgagacggtaatttataaagaaaaagaggtttaacggactcaccgttccacatggctgtggaggcctcacaatcatggtggaaggtgaaggaggagcaaaggcacatcttacatggtggcaggcaagagcgtgtgtgcaggggaattgccctttataaaaccatcggatctcacgagacttattcactatcacaaggacagcatgggaaaaacttatccccatgattcaattacctcccaccagctcccctcaagacacatggggattatgggagctacaattcaagatgagatttgggtggggacacagccaaactgtatcagtatgcctgtgtgtatgcatgtgcacgtatataaattttttcactagtgactgatggaccatctataaaataaacaaaagagaagagacagggtctcactttgcctcctaggctggaatacaatggcatgaccatagctcattgcagcctctaattcctgggctcaagtgatcctcccttctgagtagctgggattacaggcacgtgccattatgcccaactaatgttttgtttgtttgttgtggagatgggagatgggagtactgctatgttactcaggctggtcttgaactcactcctggccttaagtgatcctctggctttagcatcctaaaccactacaatcttaaaaaggaccagtttcctggattacctctctccctccatcatccactatctgccgtcaactctatagagtcaagggctatccctgccttttcaatagaagccctcaagaagtcactccatagggactatcttgggctttgggaagtgtacagggttggggtgggtgggaaggtgaggaggaaaggccactgtttcaggtggggttggagggagatggaaaatggaccacagaggttcagagaacaggccctttgtggaaagggggagaccaaataatgctgcgttgtgaaaggtgaaacaggctgcaaacagaaggagcccacaggaagccctgctctgagcagctgaacattctggggtcctcagactccgataaaaaagcacatttagcctacagctttatgcccttcctcctacccttgtggactctgccacagacatgccctccagattgattctatccacttgtctctagtctactgctactattttagtctaaggccttctccccgctttcctgggttatggtcacagactcctatctgagttcccagcaccaggtgcccagttgttttcatctcttaacacattccacatattatagcaagagagatctttctcaaatgcaaatcagaccttgttgcatcccaatctcaacccctttagttgctcttctctttgccctcatggtcaagttcaagctctctagtgtgggggcagatgttcctttataatttttctgcttatgtctcctgcctcaggcctcacaattctccacctcacagatgatgtctcagccatgatgagttcctctcaaatcctttaggtttcagagatgtcatttcccctgggaacattttcctgactcctcgttccaagcatatgtctgtctttatgttcccatagcacctgatcattggatcatggtagggtttatcacggtctcgtatttgtctgcttacttgtctgtattcttcacttctcaaatatgtcttctttgttcatcactgtaactcctttccccagaatgttctcagatatttacacccatcttccccctctgtgaagggaataaatggatatataacactgtattagtccattctcatgccactatgaagaaatatccaagactgggtaatttataaagaaaagaggtttaaatgattacagttctgcatggttggggagaactcaggaaacttacaattatggcagaggcacctcttcacggggtggcgggagagagaataagtgcaagtaggagaaatgccagatgcttctaaaactatcagatctcatgagactcactcactatcacaagaacagcacgggggaaaccgccccccatgatccgattgcctctacctggttccaccctagacatggtgattatgggaattaaaatccaaggtgaaattttggtggggatacagagccaaaccatattaagcaccatcctcaaaatagccttccagctgaagacagctaaggcactcatgtagtcttattttgtctcagacaaataattttacctttgaatcattgttcattaatctagattttaacctgaggccctaaaaattgtttatcatcttctgggagatcttactcctagatggtgttttattccacaggttaaatttaaacttgggccaaatctccatccttgtggcctgtgagtactgaatttgggactgaaagcctgggactaactggaagtgtggaaaaggaggagggtgtggcgctgccctcaatgatttttttttttttttaggatttctggtggaaaaggagagacactcaggaatccccagataaacatggtttagcttttgtagtcagatcctttccccaaatttactgcttctttctccaccacttctcaaccccccaaactgaacttgcctcttcaacacactcccttgtgccctatagacagtcacaagcttgacctatagagagcatgtatttcttgaggcaacgaaggtaggaaaccctattctaaaatgtttcttacacttttggctctgtctaaattctccatttttcaattaaaatggaaacgagattagaattctattctagttatgaatataatcagaacacaataaagcagaaagattgcttcaggctcttctgttaacgttacatttattcaacaactctttatggggacttgctatgagtgaggcaccaggctaggcaccgcagctacaaaggtgaagagaacataggctcttcttcaaagaaacttacactgtaagctttatagttatgaaatcatgattgcttaccttaaatgttcttgacctacattcttagatattttgagtcttgagaaatttgtttatttttttcattattatacaatgtcaattagctcagtggaatccaagatgttcggctagccttctgatccaagatagtggaccaaacatttgtatttactcattgtgcccctccatacttctctgaaataaaagtgtagatcttcaaaattaaacatatctataaagcaaagggaacagaaggggacattatcagcagattagacattccaaaaattttttagaaaataaaagctaaattgaatagtaagacacggaattattagatgtgtttggaaaaccaacagcatgaacaagataatccaagaaaaacaagttgtcccttggtgaaaatggaaggaatttgagaaatatagaagtgaactaaacaataaatacagtcatcccttggtatctgttggggactgattccaggacctccctcagataccaaaatttggatgcccaagtctctgatataaaatggtacagtatttgcatacagcctatgcacatcctactgtatactttaaatcatctttagattacttataatacctaatacaatgtaaatgctttgtaaatacttgttatattgtattgtttagggaataatgagaggaaaaaaagtctgttcatgttcagtacagatgcaactttttttttttccagaatctttttaacctatggttggttggaatccacaaatgtagaacccggctacagagagctgactgtaattaaaaccaacagcttctatttggtatactgaaagagaattgggaaatcattaaatccataaaataagaacaggatggagtgaaaaaagctggactctgtgacgaaatggacatatgtatggataagaatcaggaaagttttcataaaggaagtgccaaactgagctagttggccaaatgaactattctccaggtggatggggcagggcatttaggcagaggaagcaacaaagcacagagtgaagcccaggaaactacaggtagctgcagggagatgacggggctacagtgtgcatggagagaggccaacatggtgaggtaggcaggaggagctcctgaagggctccaacctgggaagccaggctaaagagatggcattctatcttgtcagtaataagaagcattgacattttgtagagatgatgaattgaggaagggatttatgtggtcatttgtggttctggctgatccccctgagtgctgtctgctagaaggattccaagggttaagtcctgaggcgtgaagaagaaccgatctgtaagatagcttaactaaggtggtagcattgggataagggtgtggggtgtgtgtgtgagggggatacaaagttattaaggtggtagaattgatggcaacattcatcttgacagagaatacaggatgaggagcagatttcagaggaatataatgagcccttttttagatctttgtgaatgttcagaaatggcagctggtgttgcataattgcaaaattagggcttagttagttattggcttctgagaacgtaactgcagtttttttctttccctctgccccactctttgaaagggggtggggctcaaagagtagtgtgtgtgtgtgtgtgtgtgtgtgtgtgtgtgtggtaaatacttatatacaaatttctttagatttttctttatctccttcactccttttcaacattttggctggttgttctgatattaccaaggtaatccacaattatggcaaatattcaaacaaaacaaattatagaaagtccagaaaaaaaaactctgaaataccttttccagagaccaccatcatgaacagtttggtctacagaattacaaatcttttgaagtatatagtatattcttttatgtggccattcattatattttatgggatcttagtattattgcttttaaattcatttcttatattttaaatttgaaatacttcaaaatatgcagaaaagtagagaaaataacattaacaccatatacttaccatgtagatttaagagaaatctacactttgccaaatttccttttttttttttttttttttttttttttttgagacagagtcttgctctgtcacccaggctggagtgcagtggtgcgatctcggcttactgcaacctctgcctcttgggttcaagcaattctcctgcctcagcctcctgagtagctgggattacaggtactcaccaccatgcttggctaatttttgtatttttagtagagatggggttttgccatgttggccaggctggtctcgaactcctgacctcaaatgatccacctgcctcggcctcccaaagtgctgggattacaggcatgagccaccgcacccgaccaaatctccatttttgtaaataatttttcagatatagaaaactacccaattatggctgggcatggtggctcatggctataatcccagcacattgggaggccaaggcaggcggatcatttgaggtcaggagttcgagaccagcctggccaacatggtgaaatcccgcctctacaaaaaatataaaaattagccgggcatggtggcaggtgcctgtagtcccagctacttgggaggctgagggaggaaaatcacttgaacctgggaggcggaggttgcagtgagctgagatagcaccattgcactccagactgggtgacagaacaagactctgtctcaaaaaaaagaaaagaaaagtaagaaaactacctgattactattacttctctctttctctctctctctctgtgttctagaggtttgcagtatcctgaagctggtgtgaatcaacctcacgctttttttttttttctttttttttgaggtggagtctcgctctgtcgcccaggctggagtgcaatggtgcaatcttggctcactgcacctccacctcctgggttcaagtgattctcctgcctcagcctcccgagtggctgtgattacaggcatacaccgccatgcccagctaattttttgtatttttagtaaagatggggtttcaccatgttggccaggctggtctacaaatgtatctatccataagcaataccgtatatagtaatatttttattattctattatttctattgaatgtttatattcatagtatcacactgtacacatccttttgcaatttgctttctttagaagcaacaatatatttttgagatttatcatgttgctttgtgtagattgcttactttttttttttgatggagtttccctcttgttgcttaggctggagtgcaatggcgtaatctcggctcaccgcaacctctgcctcctggattcaagagatcctcctgcctcagcctcttgagtagctgggattacaggcatgtactaccacactcggctaattttgtatttttagtagagatgggctttctccatgttggtcaagctggtctcgaactcccaacctcaggtgatctgcccgcctgggcctcccaaagtgctgggattacaggtgtgagccactgtgcttggccaattatttactttttaatttattttatgatacacaatttgtctctttatctcactttattttttgatttttttttttttaaaccaggatctcacttggtcacccaggctggagtgcagtggcgtgatctcggctcactgcatcccctgcctcccaggtgcaagcaattctcctgccttggcctcctgagtagctaggactatagggtgtaccaccacatctggttaatttttgtattttagtagagatggtattttgtcatattggccaggctggtcttgaactgctggcttcgagcaatttgcccgccttggcctccaaactctctttattttttagatattgttaacggtactatgggcagtatccttgaacatctctctttgtataaatgtgaaagacattcatagacatgggactaaaggaggtgcccatagtcaaccatgctaggcattgacaaatggcttcctaaaggggtaatacctgtgtacattgccactagcaatttgtacactttcttgattcctttcactcttgtcaaaacttactcttttttaaatttaaaattattggccaggccatggtggttcatgactgtaatctcccagcactttgggaggctgaggcaggtggatcacctgaaatcaggagtttgagaccagcctggccaaacatggtgaaaccctgtctctactaaaagtagaaaaattaactgggcatggtggtgggtgcttgtaataccagatactcgggaggctgaggcaggagaatcgtttgaacctgggaggtggaggctgtggtaagccaagatcacaccattgcactccaacacaggggacagagtgagactctgtctcaaaaataaaataaaataaaataattgtcaatattgttggttatgaaatgctatctcattattgtttaaagaggcatttcccttgataactagtgaggttgaattttgttttccagatgtgcatgagccattggtttttttctgttatgcattttctattcatatactttgaccacatgatatgtgcctggtcataacccatcaaactcttctttctctcagatacttcactttatggaaatctttttcacgtttatccctcaaacccagaattttgagtgtcatacctgttctaacataaatttgaggaaaatgaaggctaattcagaataaagaactatataagcagatggacagtgtgttctcctctaaataggggtgctaggataagaggcggtaggataaatgcacagcctcaaaatccaccacccactaaagacctcacagtacatgatgacattagcatgctgtgccagcatttctacctaccacgatgacctggaatgaaggacaaaaggggcaattgttaagtcctgtgcgtaaactttggaagagaacataccttgctttaaaccattaagggggcaggcaatagattcctgtacagggtggcttagccaaaagtggctggtcttgttctcatttatatggtttataatgattctaaatcattctcggagaaaaacagactcatttcatctccctttaattaggatttctgttactgcaatattttagtggcatttatgtcaaatgttttcttttgagaacttctcccttttactgtcttttttcttttattttaaacttttattttaggttagggggtacatgtgaaaattggttacataggtaaactcatgtcaagagggtttgttgtacggatgattcatcacccagggattaagctcagtactcaatagttatcttttctgctcctctccctcctcctactttccaccctcaagtagaccccagagtctgttgttttcttctttgtgttcataagttctcataatttagctcccacttatatgtgagaacacgcagtatatgattttctgttcctgcgttagtttgctgatgataatagcctccagctccatccatgttcctgcaaaagccatgatcttgttccttttaatttactttttgctattctgattagagagtggccatgctccatgctccatatggatattctttggaaacaaagcatttttgaaatggtaggattggggctagtaaaagagaacagaaagaattgtgaacagggtctcctccagtacagatggttaaagaacacaaatagggaagtgtgatgagtgacctccatttaattgggcgcccaagctcttggctgctccagcatgggttgccatcctgactgatcccttggctcagaaacagatatggtgctatcaggaaagcaaggccaatatctgaatattgcagcagagactgctcccatttcagaaagcaacccagattaaagttgatgattcagtttcaataaatgcttccttttttataaaaggcatttaacatcactctttcccctggtaatatggaattagcttttgggatcaactggaaaatgtcagagggcgattgtaaaaggccacctgctaaccacaggaagctgggctgatacagaatgccaggttaacttaaggtcgataatggttacttccttgtcactttttacatgcatccttgctctgcagtgggggtcataagaagtaagatgcatgcaaggtgaatttctagaagtcagcttctctgagaagtattctctgaccatacattcctactagtccccacatacgctgctgatctccccatcttcacccccattgttgaaattgctccctcattgtaactgttcactcatctgtctccaccataaagcttaggctcctagaaagtcaggaccagagctagtacagtgccccatgttcttatggaatgattttagtgccttgagtttggtgtggtgaccagagctggtggccaactgtcgtgaggccccagtccttctttttgtcatgctttccctcccagcccctccttgaccactctttcacctccatctttctacttatatagagacaaataataagatgcttgtacaaagggtgtacttgtattatcccatttgtgttgatattccacaacagcaaattaggtttttttgtttgtttgttttttgatggagtcttgctctgttgcccaggctggagtgcaatgcgtgatctcggctcactgcaacctctgcctcccgggttcaagtgattctcctgcctcagcctcccgagtagctaggactacaggcacccaccaccaagcccggctaatttttgtatttttagtactgacggggtttcaccatattggccaggctggtcttgaactcctgacctcaggtgatctgcccgcctcggcctcccaaagtgctgggattacacgtgtgagccactgtgcctggcctgataaggtttaaagattaaataccatgtcgttaaatttgcaaatctctcgaataggaaaatcaggaacaatgacaacattcggagcttcccagaaggtaacaactatggggagttttgtgggcatctgagagaagcacacacacagatggtttgcctttcattggtccattcttgcccagaaggcgacactaactgaaacaaagaagcctcatatgagaaggacatggggtcacagcagcttttggggtggccctgggtccttgatctggtctttctctggctcattttgtattgctcactttgttacttcacaatccagggcttgtgacatttttcttctctggagtggaaatgacagagctgcagaacacaagtttctgattggttcctatgagtcaggaaagagggccagttgaaactgggctcacacacacacacacacacaaactaggctcacatgtgttttcccatcagctaaacaagttttcagaagtacagaaataactcgttggggaaggggacccaggacaatgacaatgtttttgatggtaatgtctgcagaagtaaggcaggtttcctctgtgcctgaaaagatggcaccatttgaggagatggcatactcgtggtggaatcttcattaagatgtcaaactaagctgtaggaaatcaactctagaaaacagctctaatgtgagaaaacatatatccagttttatagagcaagagctgtgatcatggtgacatttaacaactgtattagttggccaagagggtaaaaatatacttgacctcttagagcaccataaatactctcagcttgtgggccaactgtgtcatggtcttttttctagcccctcctctttctcccttccttcttgtctctctcctcctctctcttccctcccctttctcctttctgaccctcttttctcttctctatcttctcgaaccttcccttcctcctctcctttaggtgctcagcacctctttgattcaataaacatttacggagctccttcttgtgccaacgactgtacacagagctgggatgtcaagatgaatcagttacatttcctgcccaatgccaagggatggcttgatgggttttgaccagcccctccctggactcccaatttcttttttttttttttcttttttttttttagacggagtcttgctctgttgccaggctggagtgcagtggcacgatctcggctcactgcagtctctgtctccctcccaacttcaagcgattctcctgctcagcctctcgagtatctgggattgcaggcatgcgccaccacacccagctaatttttttgtatttttagtagagacagggtttcaccatgttggccagggtggtctggatctcctgacctcgtgatccacccgccttggcttcccaaagtgctgggaatacagtcatgagccaccgcgcccggtgccctggactcccaatttctacctcctggaacgtgctttactcaccagccttggtgttattctgcaatatggccaactgggatttttttcaatcttacagaaattattctcggaaatgtttgctatttttttttaatgaagctacagcatacaatttaaggataaataatgtacttactctgcagctattgtttcaagtcaaatccgctgattactcctccaaaattcttttcttaataaaatctctgaccctttcctcttcctgttagaacttctggagctaccattgttcctcctcttgggctgctcataacctaggggagtcacagtgaaattacttgctttaaaattctttaatcactctgcgagttgttaggaaaagctgacacatctgatttggaaactcccactccagtggactgttgtgcctcagcacacagggacgggtggagcaaaggaacaagaagccaaaaactctcagggcacttactatgattgtgtaaaagagagactcatcaattaacacaggtactggcaagtgcacttcataatgcctccatttctagacagatcaaaaacagtgtgccctgtcaataaatgctgagtttctgtagcagcctgattgagatcagctaacctttaggccaaaagcgggattcttccttgctgaagcttttggcaaagcatattgagcttcatgccagggattagattaactcttgcaaaactggttcaccaggaacaatgactcagtgttttttttttagtatccggcatattgtgtggagcagctataaatatatttacaagctggagtttcaagggaggggagtaatagcttgctgaaaaacatgccaactgagttatgggtcttcacgcagccagcatgctgtgttttgggctctgcctcttgtaatttttagaaattaattagtttattctttatttatatttatttatttatttattttcagatgggatcttactctgttgcccaggctggagtgcagtggtgcgatctcggctctctgcaacctccgcctcccaggttcaagtgattctcctgcctcggcctcctgagtagctgggatttcaggtatgcctcaccatgcctggctgatttttgtatttttagtagaggcagggtttcaccatgttggtcaggctggacttgaactcctgacctcaagtgatccacctaagggtactgggattacaggcatgaaccactgcacccggcctgttggttgtaattttattttcctcctcaaggactttgagcacattatcttctctttaataacttgtttccaccctcctttgtgcacgcgcgcacgcgtgtgtgtgtgtgtgtgtgtgtgtgtgtgtgtgtgtgtgtattttctgatctccctacgggggcagagagtctcaagcaggtatgtccatgttattaacatactgtctgcttattaactaactgcaccaatgatgaaagccaactgacaaacaagtgatgctcttatccctccttcgcaagcaatgaatctgaaagccaagagaagttttcctttcaacaggaagtgttttggagtccgaacaactctgcatttagacagtgcagcttttagttacagatcttggcaatggggcaggcagagggagcggcaactacagactttgccgtaggactgttttctatggagtgtgtgtgctctgacgagctagtgacaggagggaggttacaaaagcatttactgaaataaggatttctaatagaggagctttttaaaagtattaaatatgctaatgtgcctagggcatagtcaacaaagagttataatacatgtcatttttcatatttatcaaggaaaccatgtcacccgcagcctttctcaatttctggcattctgagaaacacactgtagtggtgcctgagggtctggggaaagaagaatagaatgaatggggcatctcagaatcgtaaactcccccagttgtagttcctttcgatgttggtcgttggatgaatttccagtttctactattgtggttggattggggagagtagctcaaattgggaattgctttttgaggatctagggcttctggaattctcccagtttctttttacctctttatgctatcttgtctactttgaaaaatcagtagcatccatttgattgcagagctgaatctttctatacagtgaggagttgtaatcacattacttataacctgcttatttaactttttaaaggtgcaagtcattgtaacctaagtatttactcacactgatccttaatatactcccctttcttatctgcaagcttctttctctggtttctcctaactctgttactgctcatgagtttaaaactttgtcttctcagttcctggcttcacctgtttggtctctgctctccaggactctgccttggaaatctgactcacacttctatatgtccctggggctcaacttcgggcctggcgccagaatcacccaggctccaagcaagccttgtagactccactcagtcctttgactcaaggaaatctccacttctaaatggctctccggttgattctgatgccagtccagggttgagaaccaccgctttagcttctagacacacagccccctcccctttttcctggagcccctcttgggtcatgattctattttccctatttctgtactcagaagggataaaaatggaagtgtatgtgaagttgctactacgtcccaggtgctttaaatatgttattttattcaatcttcacaacagtcttatgcagtctctatttttattttaagaatgaggaaaacaatacttgggtgcagtggcttatgtttgtaatcccagcactttgggaggccaaggtgggtagatcacttgagcccaggagttcaagaccagcctgggcaacatggcataaccctgtctctaccaacaatacgaaaattagccagtctcataacctggtctataaataaataaatagataaaaatttaaaaataaaataatttaaaaagaaaagaatgaggaaaacaagattcagagagccttggtcatcttcccaaaggtgcacaattaagaaatggctaagcaggggttctgactcagatctgtcagcatctacagctttgctatttaaaagagcgtggtccgtggactagcagaatcagtgtcacctgggatcttggtagaaacacaaatacttgagtgccatctcagacgtactgaatcagtttcttcaggggtagggtccaggaatatgcattttatgaaggcctctaaatgtttctcaaagtttaagaagcatggggaactatatcttttcctactatatagtcttatctctttccttgtttctttactccaaagtattgccttatttctttcccagaaacctcactatcagctcactgtgcagccttactcatatcttcctcaaccagcagttttattacacacacccttctcatttcctcacattgctcatggtatctgactgagtacagggatccaacctggctttgggttttgcactgtcttgcctcagtctcttaatttcttcctatgtacattttaagatattgaagacactaacttccaaacctcttctctaaatctgacagtgaagcagtgtgtgtgtgtgtgtgtgtgtgtgcatgccagtgcatacaccacacatacaagcacatacacagagttaagtttggtcacatttacttcattaattgatatataccacaactgagaaaaacttactggcattctgctccaagcttgaattcccagacgaaaaacaaacaagcaaacaaacaactcctccttacacaaaaatatctagtggccttggaaaattccatttaacattaaattgtgtctcttcaaagtgaagcagggtgggcagatttttgaacatgaatctactgataacacaacacctcttcaaaactagaatctcattcagggttaaatgatgtccaagtcaaacctgagatgctagcatgatgccccatcctcagtcagaggtttcagggtggcaaacaacttttgctcactctcctctgcctctctctatatttgcagaaagtccagctttcactgcaaaagttcgataactctgtaaaacagtttgatcctaacttcaaaagaatttttatgctatttggaatacataaaaaatgaatttattccaatactttagccccataaataatgcataatgattggtgaaagattagcattttggagttcaagtacttaaagctttcttggatggataatgcatcacccttaactagcataaggggaaatagaaggttgacaaggaaaacttaatttagggttctttatttatttttctctagttatgtttaccttcccaggttgttttattaatgccacttttcacaaggatatttcatgaataaatatcaggttgtatctctggccatctgtgatgatcacgtttttatttttaatgagttgctcatggattatatcctaactggaattgcagtcagtatattgagatgcattgactccatttctgtctttcattcttctttctcaatgtattctcactggattagcactcttagccctgaggactcttgggccagttttattactaaaagaagaattacagttttgctacacagtgaccttgcaagaagtatcagcacagctcaatttcaaattctcctcaaatatcaaatatgttcttggtatattttgcttagcagtttattgccttctcatctccactgtttttcctgagtaacagctcagaaatctataaataaaacttaataatggggagtgactcaaaagtctggttatttttattagtaaactattttaggggtgaacacttcacattttacattctcatgctccacagtgctgaaaatagtctgaattttttttgtgtgttaggttgatgagaatatttttgagatgactagcagaaaacagaatcattaaaacagtgctatcagttttcatgttgaataactttacaggaaatgatagcatctttttttctttttttgagacggagtttcgctcttgttgctcaggatgaagtgcaatggcgcgatctcggctcaccgcaacctccgcctcctgggttcaagcgattcttctgcttcagcctcccgagtagctgggattacaggcatgcgccaccatgcctggctaattttgtacttttagtggagatggggtttctccatcttggtcaggctggtctctaattcccgacctcaggtgatccacccgcctcagtctcccaaagtgctgggattacaggcgtgagccactgtgctcagccgatagcatcttaacaataaacatgcaaagatttgtaaatgttggcaaacagcaagaaaaacatatttagaaaattgtgctatgctttaatgtcctgtctgtacgataatttacttagctccctaccttccccccagcccaccagaatgtttaaactgaaatttaaagcacagttgatcttggcttggataggcagcctgcatattaactgaggatttagttagtatccaggagcagatctacttctcaaagtgagattcacatagcccccttggaagctttcaaatagattgactagccttttaaaattcctcttctcccctttcttattgcccccgccttgtctagctgtatgctaacttgctgcatagaatcctgaatttctggatttctacatttctagctcaatgaatggggtaaatcaaaacttaataacactcttgattttgaaaagcttcagtgcttcatgtaagactttttgagaaaagatcattttcatttatttctgttttatttctagcttaatgattaaatgtaagctgttcaatacctttttcaatatcccacttgttaaacccacactaaacctcagaaatattgagtcagtgatctaaatttccattcaaaatttccacaaagcagaagcataaatgttttcattgtcattacaaataaacagacagggctgggcgcagtggttcatgcctgtaatcccagcagtttgggaagctgaggtaggcggatcacttgaggtcaggagtttgagaccagcctggccaacatggtgaaacactgtctctactaaaaatacaaaaaaattagctggattggtggtgtgtgcctgtgatcccagctactcaggaggctgaggtaggagaatcacttgaacctgggaggcggaggttgcaatgagctgagattgtgccactgcactccagcctgggtgacagagtgagacttcatctcaaaaaacaaaaacaaaaacaaaaacaaccccttcccctccacgaaagaaaaccccaaataaacagacaaatgaaagcaatgaaaacaggaaaataattttgacacctacttctgggatgttatgttatgctttgcattggttctatttattagacatgttcccatctttattatttaagagcagataaaataacctcactacattaatctcttttgctctgcctctttccatatgattcttcactagcagttcccaaaacaaaaaaattgtgcaccaaaatcccaactgagactcaattgtttgctgactcaacaactctaatgagaaatcttatacaagagcttttgtttcaaaaggaagtgccaggaaaattttgcttccctcaagcaatggcatgttttctttttctggacagtgagaaccatgtaattaaacatattttcctttgtgctttggctgtcaggaaactcagagccaaacttgtagcccaagttttatggctatgtaagacattatggcccatatatctggactcttcctttctccttggtattgatcttcagtcttggctttagtttacaaaatatgccattataaaaaataacagtatctgtaggctgtctgaaattattatggaaaaagtagtgtacaaataaatgaataagtcaattgtttgaaaaacaatgcatttgtatcagaaataactttgtgagtggtcttcaggttcctagtctatttcattttgatatatatttcttgtgggtttaccacgtgccagacaaagatgttcctggcaggggggttaataatgttaacagtactcagtctttctagtgccttacaggctatagaaggagaaagaaatacaaaacaaactaaaataggtattcaattgcaacaaaagcaacttgatgtaggggtacaggggaaggaataattcattctacaggcctttaaaagataaagaggtatttcaaaggcaaacaatggagagaagatcattctaagctaaggaggttgcatgaagaaagcataatgtcactacttttttttttttttttgagacagggtctggctctgttacccaggctgtagtgcagtgatgagatcacaggtcactgcaacctccaccttcagggctcaaaccatccttccacatcaacctcccaagtagctgggactacagctgcatgccaccatacccagataatttcttttattttttgtggaaacagggttttgccatgttgctcaggctggtcttgaactcctgagctcaagtgatctgcccaccttggcctcccaaggtgttgagattacaggcatgagccaccgcacccagcataatgtcatcaaattgaagtgagaaatgggaatgtcactaccaaccataagtaataaacaatagattatcattaactttgctcctagagaaagacaagtttatttagaggtgaggcgagtagaatttttttaagggaacttctgggtaatttaacaccatgatccttctcgaatgccttacaacgtaaaaatgtagttctcctttttcttttcttttcttttttttttttttttttgagacagggtctcgcttcgttgcccaggctggagtgcagtgacacaatcttggctcactgcatcctccgccgcctgggttcaagtgattctcctacgtcagcctcctgagtagctgggattacaggcgtgcactaccacgcctggctaatttttgaatttttagtagagatgaggttttgccatgttggccaggctggtcttaaactcctgacctcaagtgatctgcacacctcgacctcccaaagtgctgggattacaggtgtaagccaccatgcctggccatttttcttgataaaggggtgtcattggggcttctcttactcctgtcactcatcatgggtgccatgtcttttttttttttttttgagatggagtcttgctctgtcgcccaggctggagtgcagtggcgcgatcttggctcactgcaagctccacctcctgggttcacgccattctccggccgcagcctcctgagtagctgggaccacaggtgcctgccaccacgccctgctaattttttgtacttttagtagagacggggtttcagcgtgttagccaggatggtctcaatctcctgacctcgtgatctgcccgcctcagcctcccaaagtgctgggattacaggcgggagccactgcgcctggcctgggtgccatgtcttaattgacaaccacaatgaagagaggaaggaaagaggaaagaataagacaatacaagaagaaaagggaaggaaaagccaatgacagacattaactggattttcccacaaagagaggtcatgaggatcaagagcatacagaagtttgcaaaataaagagtttctctggcttggagttgaccaaaataagagaaaggtgaagcgagtataatgtacggagacttctcctgggagaagttgtcagtggagaagttattgggtcatatagtgatggtgtgcagataggacctggtggtgagttgacgaggagccattgccattcagccatcaagaatcatgatgtgtgttgtgtaggaatggagaggtgagtgtggagtggatggggcgtagatggagaagcaggaggattcgtcatgcaccctgaggcttgccagtattgatgtcagacttcctccgaccgtgttgccaccctggactgtttgactttggtagctattttaaaacagcaagaagagctgcttgagaagaacctgggggagatttcacaaccagcagctgcatcgaatctccctggatgtgtgcttttggaaacaatttacacaagggctgatttcaacatgcactaatatatacagtttagctggcattttatatggaaactttaataaaatggttctaattagtgcttaatttacatagattagagagttctacaggcccacacagtagggcttggggattttatgtcatttgatggagatgccagtttgattcagataaagaaccaattttagggaatactgctgaagtttgcccgacacaaatgaaggagttgtagcttgcatttcttttacccactcttgttcagtggcttgaactagctttctgtctcttccacaagatttaggacaagatggatttctgtgtcagcatgtagtaggagagctttgattttctagttctgtcctgtgtggatctgtatgtagctcagattcccccacaatctaggtcagagaagctgctagccttggtgcaaagttttcaaaaaggcttctattcagagagatgaataaggaaaaactcacaccctacgtgcgaaggttgcttaatgagaggtgtgagatggagctcagttgccacttatctctgtagttgggtaccgttgtgcagtctgtgcactgcccagccatttgcagtgaccccaaagaggatcatctggtcatcttgcggggagagactgtgagttcctgccatgtcacttggtataacatgagaaaactcaaaactctaggcagatctttgcacctgccctacttttctacctgctctcacaatcttcttgagggtgaccagagtccaagtaactaagtgtaattcaatgtggtgaatgatatgattgctacacaggagtatctattaaggctttcaaaatgtaaagaggaagtgactcattcttcctggtggtggtggttgcatcaattggtgtagtctattgcctctctcccatcaacaagggacatttggcaaagtctggagtgtgtcaactgtggggtggtggtactaccggcatctagtggatagaggtcagggatgctgctgaacattttacaatgcccaggacagccctcccacaataaattatctggcccaaaatatcagtagtgctgccattgagaaatctggttatgtaacagataactttttttttttttttgacatggagtttcactcttgttgcccaggctggagtgcaatggcttgatctcgactcactgcaacctctgcctcctgggttcaagtgattctcctgcctcagcctcctgagtagctgggattacaggcatgcgccaccacgcccagctaattttgtatttttaatagagacgaggttttaccatgttggccgggctggtcttgaactcctgacctcagatgatccacccacctcggtctcccaaagtgctgggattacaggcatgagccactgtgcccagccaacagataactttttaaattctcagctgtttaacccaacaaataattattttcttcctcaagctgtatgtccagcatgggttggcaacatagccctgtttttcctagtcccttcaagaagtctattgatggaagatgcatttttatgtgggcttctaccaccactatgagagggggaaggaaatttgttggattgtaccctgaattttaaaaagcttctgcccagaattgacatatattctttccaattgcattttattggccacaatccatcatatgaccatgcctgaattcagagggagtaggtggagaatacatttttaatttttaattttttttttttttttgagacagagcctcactgtcttgcccaggctggagtgcagtggcgccatctcggctcactgcaacctttgcttcccaggtttaagtgattctcctgcctcagcctcacaaatagccggaattacaggcatgcacccccatgcctggctaaggtttttcatatttttagtagaaatggggtgtcaccatgttggccaggctggtctcaaactcctggcctcaagtgacccatcctcctcagccttccaaagtgctgggattacaggtgtgagccattgtgcccagagagagtgcatttttgtcttgtacccagaaagaggagagagtgagaataatcatgaactaccctaatgactatcatgctgatggtaatggtggttgtaggatggtgtgagaatttaaagacggcttcactcctgtcactttgcttacttactgctgtataacaaactgccccaaacttcagggatgaagctaacaaaaaaatcatttaatttgctcatgaagttgcaatttggatagggctgtgtagaacagctcctctctataccatggggcatcagttaggacagctcaaaacctgggagtaactcaaaggctgggggctataatcatctgaatgcttgctcactcctgtgctctcatgtcaggcagtggatgctggctgtagacagagacctcagctgtggctgtcagcttgaccacctactcccagcctctacatgtggctgtttggctcccttacagtatggtggctgggttccaaggcagaaagtaaatgctgccagtttcttaaagtctgtctgcaaattggcacagcattctttctaccatattctattcatcaaggagttgtagaggccaattttaaggggaagaaaaatagaccctatgtttcaatagcaggaaggtcaaagaatgtggaggccccagaaaactgcttcccaggtaagtgacaggatagaaaaacaagatttttttttttttttttgagacagggttttgctcttgttgcccaggctggagtgcaatggcgtgatctcggctcaccacgacctctgcctcctgggttcaagtgattctcctgcctcagcctcccgagtagctgggattacaggcatgcgccacccagttaattttgtacttttagtagagacagggtttctccatgttggtcaggctggtcttgaactcccaacctcaggtgatccgcctgccttggcttcccaaagtgctgggattacaggtgtgagccaccatgccaggccagaaaaacaagacttctttaggtggagtttggggaatgagctttctggacaagtaaacggcatgcatcaaggcacagaaacatcagagctgcatttgaataaattctcctagctggtcttacctcctagctacttacttctactgttgacatcaaccttataaacttgctagaggctcagtgtggggaaacaaacaaacaaagcctcatgaaacgttttgatccaattagaaaatgtctattaaatacattgtgtttcacaaatgtgaactattaatacaatctgggtttgttccgatttaattgtctaaaattatacataattcatcttgccaacaaatgaaattattgaaaaattaaaaatatcaccaccaattttttctattaaatgtatatttttgtaatgatagcttaagtttcatctcagtttgagatttagtacactgtggcattcactctggttggggttcatttggctctgagcttcaaggttcaatttagacttcaaagcatgtcggacttgacctgaggcacgtttttaacaatcaggtgcagtttgtaaggttatgggttgaggaatagcataaatgggccatcctttttctgattttgagaagagaatgactactaatacccaggtgtgttcttgtctttcttgagtcaattctaacagcattggctgtgggttataaaaccataaaattttacagccaaaaacaactttaaaggtcgtttagatggaacttcttcattttgcagatgaggaaactgagaatcagagacaaagtgacctcagggcattacaacttactattactatattgaaagaggaagggaagctggtgcaagttgagggacccactgatgaactgcagggtatccaatgttgcccctgtgtttgggctgagggagaagcagcttcttagcttctgctatgctgacttatcttgtgatctctgtcccagcccttggctgcctctcctccttgtccccaggcctgcaccattccatctgcctcctgattattcactgacagctgccttttccctcaccctttgttctcagtttttaaaaatccaatggggagaagcttggattcaaatgatagcattttcagctcatgaaaaattctataacaagtgtatttgaccgtttgatctctggcttctcccacacacttgccctttatactctgacagccataagcttcatttccttgaagcagattgcaatttcaatggaaaggaaataattgtgtagctttcaagctgagttcagttctaaaaaggactgagcaaagctcaatcctgggctattgtagaatcttagtcactgaatcaggcagtgaaagagctctctccaagcttcatggttatgatcttgaaaaacaccagagctaggttcaaattccagccataccatttcctaactgtgtgattttggcaaatcacacaaatacttaaaattctttcgactcggtttcctcttctgtaaaatgggaacactaattaatgctcacctcaaaaggttgttcattcattcaacacatattcgttgggtgcctcctgtgtgtcaaactgtttcagtccagtgaggaagatggacatgaatccaagagtcaccaaaaaaatgtaaagtggcacctgtgatgagtcacaaaggggaggtatatgagaaagtgtgtgacagtatctaacaggtgagggcattatataatttattgttgcaaacaggacatttttgagcatgtaagagggtgtgttaattgtcctggaacaacaggcataaatcaggactttctgggcaaactcaggccctaccccactcttacctacccttagtataagagggaaggttgggaaaggctttcctggggaagggaagaagaaactgagatccgcggaataagtgaggattcctaggcaaaaagaggaagacagagtggtttaggccaagagagcaaacagtggtgcaagactctaaggcaggacaaagcatggagcctgcagagaacagacagaaggtcagtgtgatgaagatgggaggggtgcgtggctttaaacacaggccccttgcttgttggtttgccctgtaggtgttaagaaatgaggctatatcaaggtgaattttaagtagaggtggcacctctacttaagaccagacttgcagctttaaacatcagtctggctgcaaggcagaatggattagcattgagtagtagttctggccttggctttccagaggaaacttctaaacaatatcaaagccttggtgtcacccacagagatcctgatttaattagtttaggttggctcccagtaggttataaagtgtgtcaggattgagattcactgtagaaggaagtgtgaatatggagaagaataattacaaggctattgcagtagcccgggtaagaagtgatggaataggttcatggcagtgggtttctgaagcagtggttctcaaactgtagtggatttgagtatcacctggaagtcttatttatttattagagatggtctcacactgttgcgtaggctagagtgcagtggtataatcatagctcactgcaaccttgatcagccttcatctcctaggctcaagcaatcctgccacttcagcttcctgagtagctgggactacaggcatggaccaccatggctatttgtttgtttgtttttaatagagacagggtctcactctgttgcccaggctggtctcaaattcctgggctaaagcaagcctctctccttggcctcccaaagtgctgggattatagccactgcaccttggcacggaaaccttgttaaaatgcagatatctgggtatcattgatttagtaggtcgtggatggggcctgagaatttgcatttctgacaaattacctggaggcgctagttgctagtttagagatcacacttagcatctagtgggtagtggtcagggatgctggtgaatatcatacaatacacagaacagcccttttgctgatcactgatcgagcaaaaaaaccatctgatgtggtagataacatcaacaggatttgatcagcagggtaaaggacaactccaggactcttacagttttctgaatttcacaactaaatgacgagtttcactattcattgacattcaggagacagccctacagacctgagaagatggtgaagtcaaagctacacatatatttgagggttacctttgaaacagctaagaggatacatcaagcaggaacatatatgtggaacctggaagggaagatcattacagatataaacttggggatcattaaagccaggaacttatcaatggcatcagtcagttctcttttcttttactcttatcattggtgtcaaagctctggcctctttttgttggttccactcaggtgccgtgatcctccagcctcagcaccttgctgtgagctctccttgggaggctgcctctccctcctccttcagaatttaccccctacttctcctttgggtcccacctctcaggcttggtcatgtgtggcattagcaagcaggtgtgcgtgtttccttctgaagcacaaatcaaagccatggttatgtatctgtgggattatttgctaaatggccacctctcctgctagattctaagttgcctgcagtgactggagaacatccctaggtatcagatgctcaatgtcttacacttatggaaccgtcaaagacagctgttaaatgtccaatgggtcagttagggagatggtggttgttaaaactgtgatgagttctcaggaagagggagaagcagttacctttgtgaagcagttgttggtatttacttagtaatgagattaaatttcctaggacagtgggtgtgtgaaccagcaatagcgccatctgctggaagtaagtgatacaacaactattatcttgactaggctcagggctgttaaaacagtattgctctgggagaaaagaatcattttttttaaggttaaaaatgtgagtaaaattctttagagtgaagatagaatttcttttgaaatggttggaaaaattggataattattgaaaatagtgttcagttttcaaagaggagagaaaccttcaagtcactgtaattaagagaagttttattgaaagaacacatggaataaggaagttagatatctccacccaaaaccagcatttcagaaaacagaaacaggcaaaaatctggcggagtgtggtggctcatgcctgcaatcccagccctttgggaggccatggtggaaggatcgcttgaagccaggagtttaagaatagcctgggcaacatagtaagatccccattttcttttttcttttcttttcttttctttttttcttttcttttctgagacagagtgttgctccttttgcccaggctggagcgcaatggcatgatctcagctcaccacaacctcccgggttcaagaaattctcctgccttggcctcctgagtagctgggattacaggcatgcaccaccacacctggctaatttcgtatttttagtagagacgtggtttctccatgttggtcaggctggtcttgaacgcccgatctcaggtgatctgcccacctcggcctcccaaagtgctgggattacaggcatgagcccccgtgcccagccccaagacccccatttctattttaaaaaaaaaaaagaagaagaagaaggaaaagaaaagaaaaatggaaacaggcgaaaacctaggcttctcaaagactgaagggtattttggaactgactggatattgctcatctctggctggttgtgttgcagcctcgttggtggcaagtgcagaccctcagtcagtgacctcctttgttgctcttccatcaaagggcccccttctcctgcccaggcatggtgttactaatatggcgatggtaggggcaggggctgcatctatgacggggagaggtatgagagtatactcatcattctgctgttgtctttgttagtttgtttctaatttctattgttggggagaaagataaattcttccctaacctcttgggatcttcacctgggtctaagaattaaatcactgtaagacaggttaacaggagaaaaatatatgagttttattgatttttacatgtacgcggagaccctcatgagacagcagaagacctgaagaaatggacaaagcagaaagctctaataccttttagacagagaaaccataaattcatgaagagctgacaagacaaaggggtttgggccagtggcagtaaattgtgggaattcactagggaggtgtaaagatagaggaagataagggatagtttagaaagtttatttgtacagctccattgcagcatcaactcccagtcaatggtgataagagttattttcttattctggtacagggagggcaactttcttaaataaatctttttggcttacgacaggtagaagagggcagatcacatagccctttccggcatctgctgtttctcaggtgactttagctcaaaataatcaacatgccacatcagcaaattttggggtgacatggcctgtttcgctatgataatgggaaagaaatcagactttttaactttgaattagaaaacacaaactttgactatgtcccacaatttatgtgactgatttcatattctatcacatctattttatattctctcatattctcctcatgaattttcccctagaatgttgggggaattttgaaatgacttggggggcatgctacaattcgaaaaggagagagacatactctccaattctctccctgcctgcctcacaatgtgcagctctcctctgcttcttcttcttcttttttttttttttgagacagcgtctcactctgtcacccaggcttgagtgcagtggcgcaatcttggctcactgcaagctccgcctcccaggttcaagtgattcttctgcctcagccttccgagtaggtggtactagaggtgtgtgccaccacgcccagctaatttttgtatttttagtagagacggggtttctttatgttgaccaggctagtctcgaactcctgacctcaggtgatctgcccacctcagcctcccaaaatgctggaattacaggtgtgagccaacatgcctggcctcctctgcttctgattcaactgctgctaccgatagacttactgaaggatttgaagccaaatggtattaattttggtcagttacttccctgtatctggtgtcctcactagacagaacttctgtgtatggctacttcatagaccccgaccagcctacatattgtttgctctaaggtctagtgccctctcttatttcactaagatacagccactgttggtgggggagtcacataacatggaacataatcactgtatcagttcaggtgctcttgattcaagtggatttaattatgagggaatttattccttacataattactaagtctagcattagagtggcctgcagatgagggttgatccagtggctcagtgatggccagaacgctgtttactttttccattctgctatctatggggttggcttcatcctgaggttgttttcctttctgtcacaggttttacatcaatggggtaaactagtttacattgtggtaacaagcaactctcaacttttttttttttttttttttttagactgaatcttgctctgttgcccaggctggagtgcagtggtacagtcttggctcactgcaacttccgcctcctgggctcaagtgattctcctgcttgagcttcctgagtagctgggattacaggcatgcaccaccacgctggctaattttcgtatttttagtagagatggggtttcttttttttttttttttctttttgagacagaatcttgctctgtcgcccaggctggagtgcagtggcgtgatctcggctcactgcaacctctgcctcctgggttcaagcgattcttccgcctcagcctcccaagtagctgggactacaggcgcatgccaccacgcccggctaatttttgtatttttagtaaagacagggtttcaccatattgaccaggctggtcttgaactcctgacctcgtgatttgcccgcctcagcctcccaaagtgctgggattacaggcgtgagccaccgcgcccagccaactctcaactctagtagcttaagacaacaaagatttatttcttgctcttactgtctgcccatctgtatcaccttctctgcaggacccagtttaatggagcacacacagaaaaaggtgctggtcactagggccaagggaacaatggctctggaaggtttttcttgaacaattcagtgttccagtcttggagcaatacatcttatttctactgttaaatccatggccagaactaatcatgttgtcccactcaccacaaagccatatgcagccccaccatgtgctcaggaaagaggaatgggaagcatttgatgaacagaaataatgacttcaacaattgggactatcagttcacagtttcaattgtaaaaaaaaaaaaaaaaaaaaaagacagaaatagaaaaagaacaattgaaagtacttgctttctcatccacgaaaaaagttggtcaaagcctcttagtgtaagtctatagcagatgatgcctgataaggaattgtacataccgttcttcgtgaaaaccaagagtaccatgtatgtaacatagttgctttgggcttcttatagcagttaagagtgtatcagcaggcctccatggtatttgaatgttaaaagctttcattccccctggaagaaaacacatagctaactaaagaaagaaaaaagaagggaaaaagaacaaagaaaaagaaccactagagtctctgaaaagagcttatgagatacctgactgtctgcgccttctaagtatgtaccatgaaaccttagattcctacctcattttgtgatggtgtagaaggcacattggccaccagcaacccttgtaaatatttgcggatttgaatttcacaaattgaaacccagactgctgagggctttgctgctaacgtcaaagagctggggcaactaccacaaaaccacatgtgggagactttttagatgaggagataggaaattcctaataagaaaagtttttttgtaaaatactttctaatgctggctctttagagaagcacattttacatgtgcaatggtgcaaagtcctagcactaagatttcttcactcacagaaagaaagaatgatgcaggtgctgttcacatgcggccggaaccatgcccttgccaagcaggtcagcggggcacagggactgcgctcctcatgatagtgcagattggctcggaagtactcaattctgtggagtcacagcgccctctgacagatttcagtttctggaaaaggaagggcccccttcagggtacctgctgttcaccttccattagattaaggttgaagagcgagtggccatttgtaggtactggtatgagatgttcctagctacccgcatgtcagccccgggaaacggcaacatttcccacccttcttaccctgggtcctgagtaggaataaaagttagtgattcttaggggcatattgagagctggcaatgatacctctcacaaatccatcccccagagataaggggtcccccatgcctttgatgtatttgggagctgtgctgtatgtgttctctttggctccccagtggagaataataacaataacaaccgcgtactaatacaacccagatgtcagcacagaccctctgttctctgtcttccctgagatatctgtatcttctcagggattactgtcggttcaggcctggctcctgctttcagcttgtgggaaaactcactccatcttcattccataacctcacatctcctatgccagttcccttctctgtgctccatgctgaaccaaatgccacactcatcccctttgctttgaattatatgaaaaaaagaaaaaaccctcatggggactttatgtgtaacagtcttcactgcacatttgataacacagatgggggtttatatcctagcagagcagatattgtcaatggaaaatggaaacaaaacaaaacacaaaagacaatcttcagccatcactatgtagcttggctatcatcttttgctttctcctttacttctggagtccccccacataccctcagaaatggagatagactctacatcaatctctgctctgggaaatctactcacatatccaaaggcaaactaacaagctcttgctccgacaacccatcgacttggggtctcatccctccctgcctaccagtctctgtgactgaaaggggcccatacagagacttattttcccaggaacgtgaatgatatccttctcctgttccttgaccttgggaggcagatttgattatggtcagctttgattcaaagtaagtttttttttttttctcccttaggagaatgttgtgaggtgctgattgttctctgcttcataatcgtatcacttattactgataatctttttctgcccccagaggttgctgaagaatgtagcatatacagtggacacagagccctgataatacaattactaaattctccaaggttgagggcctggtcttaggtcatgagattactgatccttgccttctgcctgctaggaaggcccaactaatttcacagtctttatcagtgaaccatagtaaagggggaccagaagagaaaaaggttatgtcttttgggaaaatgccaaaatcatattgtgaaaatccttcctactgttcttctcatgggagggggaggactttggacttgtttctctccttttcctgtacatttggggatgtcagaaccgtctgtttcctcatctacacgtggttagatgccgacaacaatctcttctcttaaaattgcttactattagaccagcagagtgtttggtattaattgagcaaggaggaatttgtaggaaaggcttggcttaactaggagagggaatgccagggagaaatctgtatttcccactatttttttttctttttttgaggcacagtttcactctgtcgcccaggctggagtacagtggtgcaatctcagctcactgcaacctccgcctcctgggttcaagcgattctcatgcctcagtctcccgagtagctgggattacaggcgtgtgccagcacacccagctaatttttgtattattagtatagatggggttttatcatgttggccaggccggtctcaaactcctggcctcaggtgatctgcccaccttggcttcccaaagtgctgggattacaggcatgaaccaccacacctggccatttcccactattttgttgataaagacatttggatttccctgcattaggcagatgtggaagaagatggaagcgatgaaaaccttcttgccaaaatctcccaaaagacctggccagtgggtgagcagatctcagttacaaaaagcctataggttgaattttctaagaaaaggcctggggaggaggtaccaggagtccaaattgaagttcgattttcattatcacagattttcatatctctctatctccctttttttgtttttggtgagacagagttcaagaccagcctggtcaacatggtgaaaccccgtctttactaaaaatacaaaaaattagccagccgtagaggcgggtgcctgtcatcccagctactcgggaggctgaggcaggaaagtcacttgaacccaggagatggaggttgcagtgagccgagatcatgccattgcactccagcctgggcgacaagagccaaactccatttcaaaaaaaaaaagaaagaaaaagaaaaaagaaaaaaagaaaatgcactttttgctgtcagtaaaagttaagcaaaagtcttgctgagagactgatatttaaataactattataatgcaatgtaaaattactgcaagagatatgaacacagtgctcaggaagcttagaggaaggagaaaccaagtccttagtgatggaaggtgggctgtcaaggaaggctttgtggaggttgtgtaattgtaggatgagggccatgtagtaggtcgacggggccctcgtgtgccaggtggaaggaagccatttaagtcttttaagctgagtggtggcatgattacaagtgcactttagaaaaatctctatggcagcaatgtggaggatgaagtaacaaaaatatacactttggttcattttgttctaaatggcaactttacctttaactgtgtacagagcttactgactatactcaagcaacaaaatgcacacttggaaatcctgtgtcacgtgcctatactagctttgtcgctgattcagcatatacacatcctccagtgtgacaggattgtgtatggaaacaggtaagactggtgaatactaggctgtgttcaagtgtagagtctcatgattatcaccaatactgtgggctctccctcttttagatgagtttttctaccatatctttggctttacaaaatatattaacacagtttcataatagatctcttggaatatggtcgtttggtgttaagcattctatctggcaaaatgaaaaataagatggtaagagttatcctacaaaaatcctaatgttctcaagctactgctgaaattctttttctagtaatttacaaaaaagtccccattttcttgtagaaataagccaattaaaaaaagaaaaaaattaaaataaaaaattaaagttcttaatgataaattatattaaaatttatttcctgttttaccctatatcctatgagcgtggttctcaaacttcgttcagtgcataccagaatcatcatgtgcgcttgttaaacagaggtctgggttccacccccagagcttctgattcacttcatggaatctgagaactggcatttctgacaagttcccaggggatgctgaggctgctggtccagggaccacacactgagaaatattgttctgaaataataacagctaatttttgttaggcagtttctgtgttccaaatacaggttgaatatcccttatccaaaatgcttggggcaagctgggtgcagaggcttattcctgtaatgtcagcactctgggaggctgaggcaggaggattgcttgagaccaggagattaggaccaacctaggcaacatagcaagacactgtttctacacacacacacacacacacacacagacacacacacacacacacacacacaaattgccaggcatggtggcatatccctatagtcccagctacttgggaggctgagggaggaggatcacttgaaacaaggagtttgagactatcctgggccacatagtgagaccctgtctctacaaaaaatatttgaaaaattggccaggtgcggtggctcatgcctatagtcccagcactttgggaggctgaggcaggtggatcatttgaagtcaggagttcaagaccagcctggccaacatggtgaaaccccgtctctactaaaaacacaaaaattagctgggcagtagtggtgggcgcttgtaatcccagctactcaggaggctgaggccagagaatcgcttgaacccaagaggtggaggttgtagtgagctgagatcgtgctcctgcactccagtctgggtgacagagtgagaccctgtctcgaacaaaacaaaacaaaacaaaaccaaaaaaaccaaaacaaaaaacatattagcttggcatggtggtgcattcctgtagtttcatatacttgggaggctgaggcagaagaattgctcacgcctgggccttcaaggttagaatgagctgtgatctcactactgcactccaatgtgggtcacagagcaggactcaaatgaaaacaaaaccaaaaccaaaattcttgggaccagaagtatttcagatttcagattattttggattttgaaatattggcatgtatctaatgagacatctcagggatgggacccaagcctaaacacaaaattcatttatttttcatatacaccttgtatacatagcctgaaggtaattttatataatattttaaataattttgtgcacctgtcacgtgaggtcaggtgtggaattttctactgtggtgtcaagtcaatgctcaaaaaattgcagattttggagaatttcagatttcagatgtttggattaaatgtgcttagcctggaccttacttgttgtagctcgtttaatcctcatggcaatgctaggacacaggtggttttagtataatattattacaaatgaagagcctgagacttgagaaagtaagacaacacactccaggtcactcagccaattagtggtgagcaagaattgaacccagatttgatatgcgaatgacttgctgtgattctcctattggtgattttttttttttttttttttttttttgagacagggtcttgctctgtcacccaggctggagtgcagtggcatgatctcagctcactgcagcctctgcctcccaggttcaagcgattctcctgcctcagcctcctgagcaactgggactacaggcatgtgctaccatgcttggctaatttttgtatttttagtagagatggggtttcaccatgttggccatgtggatctcgagctcctgacctcaagtgatccatccgcctcggcctcccaaaatgttgggattataggcgtgagccactgcacccggccccttattggtgtatttttatttcccaagtatgacacctgttcagagactttggaaccctgagaacattttgttggtgtgttttgtgactaatattgcctttttctgagatgaatgctgttctttgaaaaaacatttgtatttttagatagaaatgtacttcatccccagtgaatatttctgactttagagaaattgccaaacctgctgactcataacaaaaataaagagcatctactattcagtttatggcttttagttttgggaggtggtaggaggaaggatagattaccacccactatagatcattttattttcattttattttaatgccatttaccagtattgtgtatatggaggtggtcttgagagctttgtggagattattttttcaatagtacagatggctctgataaatatttaaggcatcttgggaaacaagaataccatcctgactcaggagaaattggtcacgtaaatcactttgtttcaagtgctttggcctctgagcatctcaaatggacacatacttcattggcttattaactcattgccggagtcactgaaggcccaaactacaacttcatgcctgaccacacaccaaggcttttttattgcttagttttctggctctttgcctattctgctctccctacccataaccatgtgagtatcatgtccagcaaactaacttactccttctctctccccactacacacacacacacacacacacacacacacacacaccacactccacacgcacacatacacagagcatttttcatgggtatgttgtcagacagatttctctgttctgaaggctcatctccttagagaaccttaccgtgtcaatgttgcatttagtttagtttagtgttgttgttgttgttgttgttgttgctgtttttaaatcttgctctgttgcccacagtggcgcgatttcagctcactgcaacctctgccttttgggttcaagcaattctcctgccgcagcctgctgagtagctgggattacaggcccccgccaccatgtccagctagtttttgtatttttagtagagacggggtttcaccatgttggctggtcaagtcttgacttcctgacctcgtgatccacctggcttggcttcccaaagtgttgggattacaggtgtgagccactgcgaccggctgttttttttttttttttttttttttttttcttttttgagacggaatttcgctcttgttgcccaggctggagtgcaatggtacaatcttggctcattgcaacttctgcctcctgggttcaagcaattctcctgcttcagcctcccaggtagctgagattgcaggtgcccaccaccatgcctggctaatttttgtattttagtagagatgggatttcaccatgttggtgttgtatttagttttaacactgttatcttctcagattgtaatgagagaacaggctatcatcacttggtgataaaatttcctgtaattataatctcattctcaaagataaaacattgatacctaatgtgcttttaactttaatgccaatttatcacaatggaagacatttcaaataaatactgtttttttgttcataaggtcttaaaaatcttgaatataactgcaaaaaagcattacatgttaaaagaaatcacaaaattagttaagaaaggagccaaactgaaagaagattatatttctatgcccttgaatctttacaaaatttagtaaaaactattaatatagaattatttacaagagacttctctatttaccagcccaatatcttcacatttctacaatctaaggggaggtgattgtggccagaaaagtttctgggctctggtattgcagttttcctgcacttaccaccatccggcatgttatatattttacttatttttcttgcttattgctgtctctttccacaagttccatgagcagagacagtttatctgtgttttttacggctattctcaatgtctgtaacagtgtctaacgtactatagtcattaaagaaatgctggttgggtgaattcagaaataaattagtaaataggtgaagcatgttggtttaatattcatcatcagaacttaaaaacagtttaaagaacctcaactgagttttgtacaataagtagtgacaaggtgggacagaggtaatttctttgtatctctgaggctttccatttcatgaggaacatagaataatatgtgtttccaaatgcagtgttcaatatctgaagagtatatatcatcagtatagaaaatagacaacacatgttaaagggaatgtaaaaattctagatgatttttaaggtatgtatggtttaatcaattgtttatatgctattctcttctcttaaaatgaaataatgcgaatgaaaaaataaaccttacaggtagtttctgggaaattcagacaacaaaattgtctaacatacgccaaaaacaatatagcatttaatgatgacatggattccgaaagacaaatcactgctcatcatattacaaggaatccaaacaactgaggggttatcatttatctatagttgcataacaaattaccctaaaatttagcagcttaaaacaacaatttattatttcataaatttctggggatgaggaatccagaagcagattcactgggtggttctggctcaaagtatcttatttgtttgctagggctgctgtcacagaacacaacagcacaggtgccttaaataacagaaacatgcattctggaggccagaagtccaagaccaaggtttcctctgaggtctccgtccttggattgcagatgcttgtcctcttgctccctcttcacatggttgtccctctgtgcacatgcacttctgtgtctctttttgagtgaaaatttataagcattccagtcagattaattttttttttttttttttgagatggagtctcactctgacacccaggctggagtgcagtggtgcaatcttggctcactgcagcctccacctccctggctcaagttcttctcctgcctcagcctcccaagtagctgggattacaggcatacaccaccacgcctggctaatttttgtatttttagtagagacgtggttttgtcatgttgcccaggctggtctcgaactcctggcctcaagttatccacctgccttgtcctcccaaaatgttgggattacaggtgtaagccattgcaccctgccccagtcagataaaattttaatctcactttaacttaatcacttctttgaaggccctgtctccaaatatagtcacatgaattagggccaagctgtatggcttcatttaaccttaattacttctttagaggctctatctgcaaatgcctccacattctgaggtggtgggggggttaggatgtcaacatatgaatttgagggggcacaatttagcccatagacacctgtcatgaggttgtagtcagctgtcagttggggctgcaatctcatctgatggattaactggggaaagatgggcttcccagctcactggtgtagttgttggcaggcctcagtttcttctcgctggagacttcagttcttgccatcggcttctccacaggttgtccagattacctaatgacatagcagctggcttccccaaaagcatggaatgggggttggggatgggataagagagagagaatccaagacagaatgcacagtcttcttataacttaggtttagaaataatatatcagtacctctgccacattctgttggtcacacacactaaccctggtaaaacatgggagtgaaccatacagggggaactggggtcattggtggtcatctttgaggctggctatggtaattaggtaaaaataaaaattcagtctgcagaaacgtatgtacttatgttacttaaaatattttaaccaattagtgaaaaatgactttgaagtatttttagctgctataataattgagtaggaattattttttcttggattgagttatatttactataaaaatacttactttttttgtcaaacacatttataagtgctgcaaatattagtgaccaatggtctattgctctaaataaaaagcaccaggagttagtatagtagttgactccagcctctggtgctagactgcctgggtttgaatatttacttttgcacttacaacttgtaacaacttgaacaatttattcaatctctctgttccctagttttctcatatgtcaaatgggagaaacaaataacatctgcttcatatggctgttatgaaggctaagtaggtttatatatatgtatgtatgtatgtatgtatgtgtgtgtgtgcatatatatatatatatatatagagagagagagagagagagagagaaagagaacttagaatagggcctggcacagagaatatgataaaagaatattatttgtttcctctttttatcatccagaacatggtgtaatgcccaatacattgtagatactcaataaatgtttttgtatgatccctaaacattgtctgtaaggaatttacaatggagtttacagtaaaaggtggtacatggtaggtaccatggaagcattacaaacagatgaccatgtgaatctgaaagaagcacagattgatttcttcgtcataaaacatggttgtatttgagctaaagcttagaactaatgaagattattgccaggcgtggtggctcacgcctgtaatcccagcactttgggaggccgaggtgggaggatcacaaggtcagaagatcgagaccatcctggctaacatggtgaaaccccgtctctactaaaaatacaaaaaattagctgggtgtggtggcgggcgcctgtagtcccagctactcaggaggctgaggcagaatggtgtgaacccaggaggtggagcttgcagtgagccgagatcgcgccactgcacttcagcctgggcgagaatgcaagagtctgcctcaaaaaaaaaaaaaaaaaaagagtatcaatgtatcaaaatcattattttaggctgggcatggtggctcacatgtgtaatcccagcactttgggaggctgaggtgagagatcacttgagcccaggagttcaaggccagcctgggcaaaatggtgagaccctgtctctacaaagaaaaaaaaaagattattattccccaaataggaaataacataagcaaacgtcccctatttcccccacgatggagctggagcatggtgtatgagaaggagagtcagagggagcaagaatgaaggggtcaggttggtaccaggtaatgaaatcattttaacataagactacatgatttggacttcattgtgtggtcacttcggagcattttagcaacaaaataatgtcttaggaagattaatctggtccaattgtaaagtaaattgagattcaggcttcaggcttggcttgatccaggattcaaataaaatcaccaagaatctgtatttcagatctgctttttttgtgtggctctgcctgtggctccataagaagcacagaaaaaagagaaatggtctgttaaacagaaaaagtgaaaaagcttcactcccagaaaatatcttcttgcatctcatcggcctgagttcactcatgttcgtattcttcaacaaattatcatgtccaggatatgaaacggctgcttggatccaggcacactgataacgctgataccacacctagaaaaagaaatgaatttcattcaaattccattctactattttaaggtttcatgtctagatggctggagattaagtgttgcagtccaggcgtggtggcccacgcctgtaatcccagcactttgggaggccgaggtggacagctcacttgaggacaggagtttgagaccagcctggccaacatgatgaaaccccatctctactaaaaatacaaaaaatagccaggcttggtggtgcgtgcctgtaattccagctactcgggaggctgaggcaggagaatcacttgaatccaggaagtggaggttgcggtgagccaagatggcactactgcagtccagtctgggtgacagagacttcatctcaaaaaaaaaaaaaaaaagtaagttttgcaattaggagacatgcctataatgtttatttagtggtgatacgtatggtttagtcctttaattatagtgtggtttaaatgcaaatttaaagtaactcaaatacagctattttttctcacatcatagggagactataaagtccctcagtaatcattcttcaaatagatatttttcttctttcatctactgccttcacgactgcagtcactttctccaacagtcttttctccaaataaaaacaaaaacaccactaccaccactaccaaaaatctcaagtacctgctatctctgatctttctcatctgctaatattctcttcctcccttactcccctcctcttttcttcctttcctccttccccatctctccatctcacacctccctctcttcctacctccctttctttcaaccttttccccttctattcttccttccctcgcttcctccttcccttccttccttccttccttccttccttccttccttccttccttccttcctttttgctattaaaaattcctcaaactggctgggtgtggtggctcatgcctgtaatcctagcactttgggatgccgaggtgggtggatcacttgaggtcaggagtttgataccagcctggccaacatggtgaaaacccgtctctactaaaaatacaaaaattagtagtgtatggtggcaccgcacctgtagtcccagctactcagaagggtgaggtgggcgaatcacttgaacccaggaggcagaggttgtagtgagccgagatcgttccactgcattccggcctgggtgacagagtgagtgagactgtctcaaaataacaacaacaacaaaaacaaactggcaatgcaggacttccttgaaagacagaggaaaggaaaagattaagagaagttataccaaaactctttttaataggtaggcagggaaaaaattgggaacctttatacatcaataattttattctcataatacttggaaatcatgactagctgttgctcttcttcaacatctaactattatcatttccacatctgattcaagcacttcctttttacatgtcttttttttttctttgcctgaaatattatttccttccatcaaattaacctttctgcccacctggcaaccctctcttcttcaagccttactcatcaagaagccttccctagcaacagggaaggctctgctaccaatcccacctttatgctctctggactaccactttgtcttgtacatttctattaaattgtaacttttcatttttgttacacatctattgactctactgctcagtgaactatttgagaccaggacaccattttgcatacctagcacaatacctaccacatagtagacatttcataaatccttattgattgaataaatcaatgatgaataacatttttataaatttcattttgtatttgagttgaagctccaagtattacaccctgttagagattttaaacttgatttttaaaatattggactagagcttaaaagaagattatattagtcaggggtctcaagagaaacagaatcaataaagtatacatttattatataattcattataagaaattggctcacatgattgtggaggctgacaagtctcaatacctacagtcggcaagctagagacccaggagaacctatggtgtagtccaggctcattccaaaggcctaagaaccaagcgagccaatgatgtagttctagtgtgaaaacctgcaggctctagacacaggaagaagccaatgtttcagttaaagtccaagggcaggaaacaccaaggtcccagctcaaacatagtgagacagaaggaattctctcttactcagccttttgttctattcaggctttcaacagattggatgaggcccacccacaatctgctttacccagtctactgatttagatgttaatctcatccagaaacaccctcacagacacacctagaataatgtttgaccaaatgtctgggcaccctgttacccagtcaagtggatgcataaaattaaacaccataaagactaaagcctgtagatgaatatctggtaacacctcacagaggagagacctaaagctgtgataacgtctctgaagccaagagagaaaggctagaaaaagcaagatctgggatatttccttagaatccttgcctgaaggccaagaagatgaggaagttaattttctcatccagagtggtggtatcgagctagaaaattgtgaagatctttctagttctaaaacatctgttacctccttaccttggggtttcaagactgggtaaatggaaatactaagataattggatgatgtaagaagattttggatgggaacaatatcttgttatgcaccagttgtatggaaactacttatttataagatttaaaattctacgtatattccttcaggaaatgttgtcggctttctacaagatgcagctttaattgtattattgggaaccatcattgattattaggttctttggagaaatttctttccttcaattagaagcacccatgaaggatatgaagaagagttggtcaaagaactataagaagatcatagaatgtactgcactatagaagccaaaggaagaggtaaatcaagaggcaagaaatgatggaaaggtattttgctatagagaggtaaaggttgataagacttgggaaaaaggccatcggattttacgattaggatattaaggacaagtttcagccaagtcatgagaaactgagcatcagttaggtccctgttgtttgatattatgacaatgtggtggatttagtaattagagtctttcaaaattgtctgttagtgctttgcagcttgggggcatgagcagagaaggtagggggcaggaggaatggggagcatgtctgtggctgagagttgaaggcttgaatggtaagagtaggcttgaggattgtggcttgttagaaaagacagcattaaaatatctgaacatgggactttgtttttagaaaggatacaaatgaagttaaaagccagaagaaggtcttgggtgggattttcaagctgcattccttggagtcttgaatcgtggattagagaaaagaccaccctgtgttgatctcagtagcttctcctgttaaacatcacagcacatgtgctttgaccagttttgtatattaaggctctatgtggctatcttctgtcccgctctgtcccccacggccattctctttccttcaccatgctgctctatgacccgggaggctgacctatatggaccatatcagtgggctgctttgccctcctgcttctgtttggattttgcccttggggagcacttgcatgagcttgcagggagggagaatgagaggcaaggtataatctgctgtgacctacagggtcatcaggatcctttccccttcaggcctagagttggtaataatgcccagctttcttaggcccttgaaatttctctataccctgctatatctgttcaattgcctacataacttaaccagtgtatgcttactactcactgcagccttgatctccctggcttaggtgatccttccacctcagcctcttgagtagctgggactacaggtgtgcaccaccatgcctggttaattttttgtattttttttgtagagacagggtctcaccattttgcccaggctggtcttgaactcctgggctcaagcaatcctcccaccttggccccccaaaatgctgagattacagacaagagccaccactcccggcccaaacattttttttttttgtaaaaagccaggcagtaaatatttttgatctgtgagttatacaatctgtgttaccaccacttaactctgctatctcagtgagaaaacagccatagatgttaagtaagtgaatgaatgtagctgtgtttcaataaaactttatttacaaaaacaggcagtgagctttgcttttggcccataggctataattgaaagacccatgatctaggacaagaagttttccatctactctatgagagtggttctcaatctgggataatttagctccctaagggacatttgttaatttaagacatttttggttgtcacaactggaggagtagtgctactggcatctagtggataaaatccagggatactgctaaacatactgcaatgcacaagacagcccccacaacaaaaattaccctgcccaaaatatcaatagtgctgaggttgagaaatgctggtcttgaagatgttaaaaagattgtcagtttgttcatcatatcgctgtggcttggcgaaaagaatcacagagttaattttataactatgaaggattgttaggagctgagtttttttctagttcttattttttaattattttatgatacttttcataaaaagtggtgtaagttgtgtttattcagaaatgtgattttttttttttttttttgatggagtttcgctcttgtttccgaggctggagtgcaatggcgggatcttggctcactgcaacctccgcctcccgggttcaagcgattctcctgcctcagcctcctgagtagctgggactactggccaccatgcctggctaatttctgtatttttagtagagatggggtttcaccatgttggccaggctggtcttcaactcccgaactcagatgatccacctgcctcggccttccaaagtgctgggattacaggtgtgagtcactgctcccagcccagaaattgatggtttctttagcaattttgtcacccatcaagtcgttagtcatattaatcctccataacttagtctttttgccccctgattatcttttgggtgggcagtgaaagtattcatacctcttttagcaaaacctatctcttcttggatttcctttgcttgctgattaagaggaaggactatctgtgaaagactcagatgtggctcaatggaatgaatgtgagaatggtatgagtgtgggtggtgggtgctgtgggggtcggagatgagtggctgaaccatccaaaaataagaatactgacaagcgtgttttcttgtgtgtgtgtgcgtgttgtgggaggagtgtaactgatgtggctagacaggattaacgaaagtctcaggagttgagagagactggggacattttaccaatggcgagaaggaggaaggatgacagctgggaaaattagtgattggaaaaggtaggctgggcagtgtggccatgagctagtccttttcattatattcttctggggctctatgtttaaaactagatactttaacatttcagaatgagaaagagaggaaaggatggtaactgatatgggctattatactgtgaattttaaaggagcctatatattatcctaaaactattgaacctgagcagaactgcaacgttggtattcttgaactgaactgatatttcctttgactaatgtccttgttcaatgaccagagaccatgacactccccaccttcacccccacacattgtttgtttgtgtccagtttgaagaacaatgacacatggaggtcagtgtttggatgatgtcataattttgatcagctggaaagcctggagtggccttgaagagatgcttaacttttggaaatcacttctttattgcaaccaaagctattaagtttaaaggtccataaagatgagataaacagtcataaaggccttttgaaattcatacttagtgtgttaaatggatttaattgctgttagttaaatgtggtgatgttaaagcaatgtctatacactggcaaaaatcagatcatcaactgcttaatgagggacacgtcttgagaaaaacagtggaagaaatgctgcttatatgtaatttgtgattaatttttgcaaggttttcaagggaataacttggccttaaaatattacagtgaaaaacagctttatacttgggtccaatcttcttaaaattagagttcatttttgctattagacaccttttattacaggataactttttcttcccccttggagacagagtcttgctctgttgcccaggccagaatgcagtggcgtgatctcggttcactgtaaccaccgcctcccaggttcaagtgattcttgtgtctcagcctcctgagtagctgggattacagtgcctgccaccatacctggctaattttttgtattttagtagagacagggtttcatcatgttgctcaggctggtctgaaactcctgagctcaggcaatccacccgccttggcttcccaatgtgctaggattacagatgtgagccactgagcccagccagttataggatagcttctaaacttacaatccttgaaatatcattttaggataattctgatcctgcataccagtgaaataagtataattgaaatattaaaccaaatttggcttcaacattaaaccaaaattaaaccaaattaagccagtatgttaaatacatagtttaatcttaattctagttaatatttttcatttcctatgtgtcaggcaatatactaaacaacttacatgtattactattttaattctcctggtaaactggaggggtgtgcaattattgtcatctccattttatagatgaagaaaactgagtcataaagaggttatgtacttggctgaaagtcacacagtcagtgatactgttggaatttgcacccagacaatttaattttagagcctattttcaaccactctctgagactgctttccttttctgtacttttgatgataaatgtgaaaagataattttgagggcattatggtgtattggatcttaaaaacccaggtaataagtcccatctatagtacaaataagctgcgtgatcttagggaaatcacataactgcttctgtaaaatgagagattacattaagttatttccaaaatgtcttttcgacttcaatgtggtgattccatagtaatgtataggtttttaaaaaaccatatccttcaatcaaatggtcatcctttagcattaagttgtttggaatagatactccccaaattcacagaataattttccagcctctctttttgctttgacacctttcttattttttttttttttcttcgagatagggtctcactcagtcgctcgggctggagttcaatggcacgatcttggctcactgcaacctctgcctcccgggtttaagcaattcttgtgccttagcctcctgagtagctgggctacaggcgtccgtcaccacactcagctaattttttttaatagagatggggtttcaccatgttggtcaggctggtctcgaactcttgacctcaggtgattcctcggccctagcctcccaaaatgctgggattacaggcgtgagccaccgtgcccgctattgaccccatttgttgatgcttagggatgaaagtggaaactccactgctaaaacagagaatattacttgagtcattcctctgtcatatatgggatgtttgccagcatggaacattcacagaaattataactgtaaaggccctagcaatgatttaatgccgtctcttcacattatagttggggaagctcaaactgtgacagggtcagggacaggtaaaattcacaaagttggtttacagcagaactgtgctacagttatctggattcagatccaagtcccctccaaatgaatcacaaccacttctacctttataattccaggccatgaaagatcactgttttagtctgcgtggtgcagtggaacagatagacctcggtttgaatctcagctctactgtttactagacatgaaatggggaaatctaaaatgagtaagtatacacagaaacacacattacatacatatatgtaatgttcaggatcattacactgaactttagggcttagtactaatgtacaatcaaggttgtgttagtactgagcagtatatcttttattgttgaagtccaataagaacagagcagatatcaacctaatttgtaagtgatgcattttcctaaactaaatgcccaataatggaatgggctagaatattgcaggacagggctgtgaatggaggaaagcagttggaaaatcaatccttttaaaggcacaaaaggatgaatgaaccacattcccaagaacctgctcccacccactgctgttcccacccccgctgtagttggtagcatgttcacaaggaaggagctggctagctttcatgggagccacatcatccatcaaatcacattagtgttgttgatttgaatgttgtttcctttgtaggtctgcttgctttgactttgtaaaattgtttagtcttgccattattatataaggactataatcataaggcatttatatttcattttgtattatgtatttaagcaaaattaagttaaaaattagacagagatatataggatgatttttccttcaagagttattcatttatttccttttggatatgaaaaacgcttatgcagtcctgtatgtggtctctctctctttttatttttatttatttattttttgagatggagtcttgctctgttgcgcaggctggagtgcaggggtgctatctcggctcactgaaacctctgcctcctgggtttaaatgattctcctgcttcagcctcctgagtagcttggattacaggtgccagccaccatgtccggctaatttttttgtatttttagtagagacggggtttcaccatgttggccaggctggtcttgatcctgacctcaagtgatccgcttgcctcagcctcccaaaatgctgggattacaggcatgagccattgtgcctggcctgtggtctctttttaaatgtttgagattttctctgaccatcacatgatggcagccgcaagttgtaaatatattaaatgagataataccaaatggcataagaccactgtgaattcagtgatgttccaaaataacttgtattttattcatcacacaggcatttatataaattaaaaaataatagcacctgaaaacatgaaaataattgtattcaaggttatttactgcagcatgatttttaagagaaaagactggaaacaacccaaatgtccactaatcgagactgtgtgaacccaagatgttatagctgcatcacacagctgagagaaggaataagatctatttctactcactgccagtggtaatctccaggaagcgctgttaagtgaaagagcaaactagagaaaatgtgaatagtggttaccatttacccaagaagtctatgtgtggtgtgtgtgtgtgtgtgtgtgtgtgtgtgtgtgtgtgtgtgtatgtgtgatttctagagggacagaggaaaaaggtgaagacaaggataggagcgagacttctctgggtacatcttttttttttttttttttttttttgagacaaagtctcattttgttacccaggctggagtgcagtcgcttgatctcagcttactgcaacctctgcctccggggttcaagtgactctcttgcctcagcctctcgagttgctgggattacaggtgcccaccaccacgcccggctaatttttgtatttttagtggagactgggtttcaccatgttggccaggctggtctcctgaccttaagtgatccacctaccatggcctcccaaagtgctgggattataggtgtgaactaccatgcctgcctgtctggatctctttttagtacatttgactttgaagccaagttagtattttccataattaagaaaaaaatagaataaaaaaggaacaatttctaaaaaggaagtcaaaagaaacacattaaactaactgtaagttgagttggtagcataaccacacagacagaaattatttcaagtgactttaacacatactgatgtgactgtgcatccctatcgagatagaaataaaggtaaatataaataaaggtaaaaataagcaagatataaataaagttaaaatgaactgcaacaatcctgaatagttttcaataattatatcataaatagtaattttggtattgttattttaaaacagttatatttataatacatatgttaatgtaatcatgtttatgcttatcataacatatggatgcacagctattaggataatgtataaacatgattatgttaatgccattagggaccaagatttcagagaaaaacaaagaaaaatataaaattaaagaagccagtaaaaatgttatcttaaatttaaactggaaacctcagtataaactcataatgtgttttcttttaaaaaattattttcaaattcagtctcctgaatagaactcgcaacaattaccaagccagtagcaacgacaataaacagccctagtgcccagatggtgctctccaaatgccattttccactaaaaggaatgagggctccttggagaattggatgttttcagatacagagcagaacacatacaaaaagttcctggaacatttgtcatactgaaaagcagatacactatgaaagactatagtaattgtatcaaaagaactcaggagccaccatgaagaggcccccagtgtccagaaatggaataatgtgaacattaagaataataaatcttaatttgtcaagatacaaatttaatcatatcgtagatactcatagcagcattatttaaaataatgaaatattagacacaacttaaatattcaaaactagcagtgtgcccttatatatagaaatgtcatttaaaccttgtagaagagaagtttatgatttaggaagatgtttacaatatgctgtaaaacacacacaacaagtcataaaatattatgcatgcagtatattccagtttattttaaatgatctaggtataaatatccataaaaagaaaactgaatgaataaatggtgaaatgtgaatagttgctatatctgtgtggcaggattacaggtggttgtattctagtttctctttatgttccaatcttctacagttagcatgtataattttatatttttttaatacaaaatatgttatttaactagtatttactaaacaaaaaattaaaaattaatatattttataaaaacaaaagcatatgaatagaaaagtacattattttttaggttatagacaatgcttgtacctgtgtttagggatttgatcctccaggtaggaaactacagatctaatttaacttatttaattaattaattaattaattaatttatttatttatttactttgagacagagtctcgctctgtcaccaggctggagtgcagtggtgtgatctcggctcactgcaacctccacctcctgggttcaagtgattctcctgcctcagcctcctgagcagctgggactacaggcatgtgccaccatgcccagctaatgtttgtatttttagtagagacggggtttcaccacgttggccaggatagtctcaatctcttgaccttggaatccacccacctcaccctcccaaagtgctaggattacaggcgggagccactgtgcctggcctaatttaaaaaatttttaagtcaccaaaaagcaaagtgacatgctcaagtccattattgccaagcaaagaaaaaaatgtcaaaagtacaaaatgtggttatgttttaaaaattagattattattattaagataggatctggctctgttgcccagacgggagtgcagtggtgtactcatggctcactgaagccttgacttcttgggctcaaatgatcctttcacctcagcctcctgagtagccgggactataaggcaggcaccaccatgcctggctaattaaaaaaagaattttttttttgtagcaatgaggtctcactatgttgtccaggctgatcttgaatgcctggactcaagtgatcctcctacctcagcctctcaaagtgctggcattacagtcctgaaccaccatacctagccagatttctattactttgacatggtcctggatacttcatctatgtgtgcaaaatttcgtacttatctcttaaatctggagaaaaatggccaaatttggtatagttgaatttatcatggggtgattaataagtgactaaagattgaccttcaaggatctgaagatctgaccagtgtagatttatagtaattatagtaattacatggtacctccaggtattttctatacattgccgtagttagctatgaaaggatgtaaagaataaaggcaattgactattttaaagaaattaacctcagaaggagattcttcacctaaatgtccctgcaaatattattgctttatgctctgagttagctgaaaatgagtttactatgcctggtgtaaacacttgcaccacccacctgtgtcaaagaacttttcactaactgcatcatgactgattgacgtcagtctacttggcaaccaagtgagccacttagaagaaggctccccttatgaggttaatttctttaaaatggtgaattgcccttattccttatgtcttttcataactgattacacaaatgtatagaaaatacctcttgagatacaatacaatctgtaactagtcatcagagaataacacgttattgtaacacagatttagcttggccataaagggcatatttacatacacattgaaaacaactttaataaaatgaaaaacatatatccttggattcttagcaatttaacagcaatgctctcaggggatcaagctactatttattgactccccctgtgtgccttacacgtaattactgaccctcacaacatccctgggagttagtgtcttacaggagacctttgacatttgtgagaggacatcgtgaatattttccaagtcctcaatccaaaagtgtggacatagctgttggttttcctgaattgtatttctttcaagaatcaaatgttgcttgtgaatattctcatgtaagattaaaaaaaatcttttcctgactcttagaactttagttttatctctgctttgagagccactttaataagcaaactaaaatcactctacagaaaggctgtacagcaaatgagtagagaacaaaagctggctaaactgggcagtcagctaagatcactcagtgtctgagaatttgttctagaaaatcaccctccgagaatcatgcagattgtgcttaggcttccttcatatattcatactctcctcgggtgaacataaattggcacatttataaggaaattttattattatatactcaaatatttttaaacatataaatagtttgtcttgttaattctacctcttggaatctatcctaaggaaaataatcataagatatctgcaaagaattatttgaatgttgataataattttatctataacaataaaaatttgcaaggtggcagatatcagtttatgtctctgagctccaaatccacccttgtttatcttgctttgtgtgaatggagctggaccctgtggatctttctcttttgcaaatttgggggatattcaactttgtcaattgagggcactggagagaccctgcaatggaatagaggctccaggtgcacctacaggccatctttccctaccagcagcgatttcagagtaacttcagcctgtccataccctccagcaatggtgggtcacttctatagatgaactctggcccacccgcagcaccaagcaaaggaaggtcactcctgtacaccagcttccaaccactctcatccaccagtgatgatagattgcttttatggatcaatgccagcctttgcactcagtcgtttctttgttcctgcaggctgcctgtggtagttactatctctctgaagaggtctgaatctcagccttggggcaaggagggcttgtcctcatccttagtgcctttactgttcttcttcctcagcctagaaataatagctccttttaaaattcttgatgcctgggcctcttagagtcctcctttatatatcttttagtaggtaatttttggaacattaaattttccctgttcaaataattatcatagtttttgtcttccacttggaccttgaatgatacaaaagttaaaggctcaacaataccagacttgttaaataagtagggagctatccacacactggcataaaattgttttgattatctattattcccttggtgaggtgacccagacccttgtttgaaagcgttttattggctgggtgtggtggttcatgcctgtaatcccagcactttgggaggctgaggtgggcagatcacctgaggtcaggagtttaagaccagcctggccaatgtggtgaaaccccatctctactcaaaagtacaaaaattagctgggtgtggtggcgggtgcctgtaatcccagctactcgggaggctgaggcaggagaatcacttgaacccgggtgtcggaggttgcagggagccgagattgtgccactgcactccagcctgggtgacagagcgagactccatctcaaaaaaaaaaacaaacaaaagaaaaacaacaacaacaacaaaagaaaaaacaaaaatgaaagaaagggttttatttgtcttctctctctctccctgttttttttttttttcttttttttttttttgtctcatctttgctgtaattgctcatttgctagggtcattggacacagagataccaagatgtcttcagaaatcatgaatattccccaagtcctctatcaaaaagtgtggacagagctgtcggttttcctggggtttagacatgttctttcttgcttctgttgtgtagtaaccctagctcctcaaggaaatcgtggtctatgggctctgccaaacagtaattcctttctttgcttgctggctcactggcttgaggaactcaaagtaatcctttggtaatttcagcttccaggtcagtggggacattaatgtgtttcttggtagaaatgtcactctactccaagaaataagatctttaatccagaaaacctgagttttcagggacagaatgcacaaacttttatggtcattcactgggagttctaatgagcaggttcgatcatatttctattctttagttcctcgacccatgcattttagctactgggcggcgaaccatgtatcagctgttagtgctgtgtgtattccatatcatgaaggtaatttcccaggcccacaacgttttcttcccaagctggtgccgtaactgagcctttaccaggctattccatcattttaggtgtttctagggtatagagtaaatgataagaccagtgactcccatgataaatgtgcaccatggtgaacttcctttgctgtaaaatgtcatcttggtcctagtctatatcgtaaggggcaccatactgatagaccaggtactggtgagcccttggatggtggtactggtagaggaactgcaggaagaaaaggtaaatccatactcagaatatgtgttgattctggtaaggacacgttgcttttccctccaagacagatggttccgatagatggttgtgtagctaccctccctgaggaacggtactatgtcaaggtcttggcatcagattccgtggctgacaggttggaaatttagcattgacagtagctgaattatcttttgtaagtgggagctcaaatatgaccatgcatagcaccatagtgattgcagcactagagacactatttatgggctttcctgcacaagaactggggtggctaaagacggcccggctaaaaggcaggatggatcatcctgagcacatggttgttgagagtcttctttgcagtcgggcggtagtgtgagatctgctttgtgtttatttccgtagggttgtccacatacatttttttccccacaccttttctctgagcttcaaatctttttttcttgtcctgtcgaaatggccaagccattcactactgcttagaagccagtgcatacttaaggatctggtcttttcttccatatgaaatgaataactaagtgtgttgctcatagttttccccactgggaggatttccctttacctctcttctttggggccacctcaagtgaggatgaaatgcaacagcagactatctctggctagaggcaataaatcacactagcccaattatgcaccaggcctgagctgtttcctccactactgattgtttgtaggtagcagttgtgggagcttctgtggaacagattcaggtggtacagctgctcaaactcataactcacctgcaatgtgttctgaaaatgtgtggcttaactgcatctaccctaaaagaacaagttggtgagtgatgagatgagtgggaagtagtgaggatgacctggattttccattgaggaagtggccaagtcctgcggacaaattgtacctaggaaaaggtacaaaaacaggagaatggatcatgcgttcagtattggaactgatgactattaagttgctgtgggcatctgaatatagatgttgtgatggttttaaaacatgtctgaaaattctttgacactgtttccatcaagaggtgatgtctttgtctcctccccttgaatctaaatgggcctttgtgacagatctgatgaatagaatgcaggaatgtgatgtccaaggctagtttagaaaagaccatgtttgtttctctggagacacttgctctgggagctattagtgtccttccaccaaagccccccaggaacacccctgcagctaaacaaattggatttattgcttattgtagcaagacagaacattcaccagggggaaccataggttatctcagtaagagggttttagaaagaacctattataagatttgggctttggttgggtgatttgggggaaggtttaaggaatcaggggtggccaggcacggtggctcacgcctgtaatcccagcactttgggaggccgaggcaggtggatcacgagatcaggagatctagaccatcctgactaacacggtgaaaccccgtctctactaaaaattcaaaaaattagccgggcgtggtggcgggtgcctatagtcccagctactcaggaggctgaggcaggagaatggcgtgaacccaggaggcggagcttgcagtgagctgagatcgcgccactgtgctccagcctgggtgacagagcgagactctgtctcaaaaaaaaaaaaaagaaaaaaaaaaaggaatcaggggtttggtctagattgaatgctctcagaaaatgggagtaattctagggttgtatattttataggtggcatagtgaccttgttttgtctgtccttacacaaatgatgaagtaggctgattttgtttcattttatcttggtcgcagagtaactttgtctgaggttggtgttctataagattgtatatgtccaacaagagaatgacatggcttagctgtgaatgtcagatcagttctggatatgagaggctgatattttctttttgagctttcagttgtcatgtaaggagtgtggctaccatgaggccactgcatagagtgattgtatacctatatataagagagatggtttggagttcaagcccccagctagtcaagtcttcccagcccaggagacagatgttcgaatgaaggagacttaggtaatttcagccccagtcactgtctgaccacaactgcatgagagaccctgagggagaactgctttgctgaacccagtcaacctccagatttgtaagtaaaataaatggttatcattgattgaagtcactgttctagggtggtttttcctacagtaatgtcattgatacaggtgtctggcaggcagttggctctagaggtctggagctaaggagaaagatctggcttggagatgtggatcaggaagtccttttacaaggagaaaagtgcttgaagtcatttgagtggatgacatcacctgaaagataatatacattgagaaagaaaaaaataaaaagccaacaatagcacctttagtaacaacactgaagagagcaggaagaaataaagaaacatttgcaaggagacagagaaggagtgaataaggtgatcaaatggcatccatccaagagatgatgtccaggaagccaagaatgagagtatttcagaaagaagagtgttgtccacagagttaaatgctatggagagagatggagtaagacaagattgattagcaccaatgagctttcattgttgacaaatgcagtttgagggaaactgggggctagggagtgatggggcagagaccagaatgcagtggggtaaggaggggtaagaagatgagaagaatgccaaatctgtgctgtttgccacatcatgggccctctctccatactatttatgtgtgtataatttttttctacaatttaataatgcattaaaccatcacatcacatcacatcacaaacccaacaattccacaatagcatgggtagatcataccctggtgtatttttaatgttatactttaaccggtagttttgagtcataaatgtactactatgttgttggttttttttttttttttgggtctgtcattatagtaataactttaaatctcttattgtttatttctcttgcaattaaaatagttcatcatttaaaatagtacccagtgttcagtgtccattggtgccttgtaattacttcagaaaaacagtctcagtttaaaagttataaactcttaatgcctctctgcaggaggaatagcttccttctgccagagcggtctggggagcattattctagtcataccctgctaattcattggcttgattgtcaggggtcctgatctagttcaccctcctgggaggctggtgtgggaccctgcttatcccagtgggggtcaaggcctccttgacaacagtgaatgggttgctaggaggctgcggaaagaaatttctctagttccatccacaagtagatcccactgcagtggcctcatttggctcctctaatcctctctttcccaccttctttcagggcaagtctcaccctattttcttcattacttgcttgtggtttccttgccggagatgcttggaggcaagcattatgacaaggatgggcgcgggtgggagtaaggcctttaaacgaagagctacatttcaaagaacttcaaatgtgtatttcaaatgtcacttccaaatgaggttgtacacacagacagaaacgcaattaacagatttggaagaggccacgtagcatgcatttgaaactcctgttgcattccttggctattcttgtctgtggcatctttttaacaaatcctgtagttaccttgtaaataccatcatagaatatattgtatttaaaaaacattctttactcagatatgaaagttgaaaaggtactattatttttaaaaatctgtattggattttttttttttcatattttaggatgccagaagcctcaaaaatggaaaaccccctgtgcttcacatctgaaaatctctgctgggggcagcaactttgagcctgtggggaaggaactgtccacgtggagtggtctggtgaatgcttaaggagctgcagaagggaaggtagtgaggagacagttaaatattgagcacgttttggtgcctagcattgtactggcctttcacatgctatgtttaatcacgcaggattgtatggaatgggattgtacagaatgaggcctgggtttgctaaatcctgggggagattgtctaagctgtcacttgaagggaaaactgtagcatgtgggacttaaaaacagcttgggatggagtttgaggtagggcgagagggaaaaagatcttggcagatacattctgaacaaatacttgtgtcatcctcaactgtatagtttttatgacttttcctgtgttcatctggttggcagatgaatgcaaaatgccttttagcttcatggaaggcacacatgaatcatggctatgtgataaacagaagaagccacgtttcggagggtttctggtgtgtgtacgtgtgcacttgcatgtgtgtgggcacacccttgtgccaaatggaccaccagtttaaatcgattttcaacagggcagatttcatatgcttctttagtgtggcccaagtcaatctatttttagaaggggaaagtagagcatgttctgaaagttcttttcttctgccatcagggattgtagtactttttatttatagtaatttcaggtctctaaatacttcaagcaaaattaatgaggcaaacaaaaaaaattaggtaccagataattggatcatgtgttattttatagagagctttatttatcttgcctttggaaagtataatttgtatttttcaaaattatgattagatctaattctttttcaagatttacttaaaataaatatttctgcctaggcacaagactgtgtatagcacaactggccttgtattattgacttgatgatgcaaagaaaaatatataagaatcagttttttttaaatgtgttaatatttatcataatggaaatagtcttactaattagcaataactagaaaaatgtctactatttattgagccactactatatgccatattctttacctatgttcattttctcttctatattcaaaataatcctataaggtgtgctttatgatcaccatttgttccaatagggtctcaaggacgttaggtaattattcctatgacattgagcctatgaatggcagagctgggagtttgaacctaagtctgatgactctgaagcttatagtctttctataagcttcttcagtctgaagctgcccctcaaagtcatggcaataactgagaatagcattcagttttacagctaggaaggtagttgtagttgtgtttattattcaatactgtccatattcaaagaaccattcattgagcttctattttactccagtcacggtgataaataatgcagaatctagagatcaaagataaaatggccttgccctcaaggaacccatgagctagttgggaaaactaataggaatattaatgattataatgcagaatgttaggtgcaatgagagaggtaacaaggtactactggggcctgacaaaggccaccgtttctgtgtgtgtgtgtgtttatgtgtgtttgggaaaaggcaaaagacacttgagataaagggaacaacatagacaaaatcaaaggcttgagagcatataacttatatgagacatagcaaattgtttgctttaactagaaaatagtggttatgtgtggcagactatgagaaatgagaatgtaagtccttgagaatgataactttagaaattctacatttgggatgatcataaccttttaaaattgtctcaatatgatagatattttccttctgttttggggtatctgtctttttattttttatttttttgaggtggagtctcactctgtcacctaggctggagtgcaatggcgtgatcttggctcactgcaaccttcacctcctgggttcaagcaattctcctgcctcagcctcctgagtagctgggattacaggcgcctgccaccatgcctggctattttttgtatttttaatagagatggggtttctccatcttggccaggctggtctcgaactcctgacctcagatgatccacctgcctcagcctcccaaagtgctgagattacaggcatgagctaccacgcctggcctggggtgtccatcttttaaagacacactgtaagaatcataatattttcccaaagaagaaatgtaattagtacacaattacatgttaaaactaggtgttattggtaattaaaatttaaaaaaattaacccaaccaaataataaaactaatgaaaatatttaatattggtaagaacaagatgcgataagcatatttgtgttttgctgattggtctataaagtggttcaaaacttttgtaaactatatataagctattttaaatgtttatgccctttgattcaatagcactaggtttggtactttataataggaaagttattagaaatatttactgcagggtttcttcaatgatgagttgtaagaatcagcctaagtagctatggtacatcactttgatgcaacttaatgtgtcattaaaaatcatgtttatgaataacattccagatgcatttaatacaattctagctgaaaaaaagatactgaaacattttgtgtttatatatgtctgcatatgtatctatatatatccctctccctgtcaatctataaattaaaaactatacattaaaaactgcaaattaaaactatatactaaagaaagaaactggaaagaaatccacagaatgttaataatcatggtcattgtgttgagtggtaggactatgggtaattttttctttctatttttatacatttttcactttttttttttttttcaatttgaggcagagtctcactctgtcacccaggctggagtgcagtggaacgatcttggcttactgcagcctctgcctccgggttcaatcaattattctacctcagcctccagagtagctggaattacaggtgcacaccatcacgcccggctaatttttgtatttttggtagagacagggtttcactatgttggtcaggctagtctcaaagtcctcccaaagtgctgggcctccaaaagtgctgggatttggcctcccaaaatgctgggattacaggtgtgagcaccacacccggcccatttttcacatttttaatgatgtttttaactttaaaagtaaaaatttgtaatttaaaatttgtttaacttttacaaataaaaattacaaatgcaaattaaaattgctatatatttttgttactggacaagaaaagatgcattatagagtctcgttttattttgttttctgataaatctattgctggggagcatgtgcgtaattcgttttaaaaattctcagtgttaactagatttcttttgggatagctctgctgaactggaatgagatcttcttccccagagccacttgctagtttgattttctagaaagagagaaattatagaaagctacaatctacaaattgctatgtactacagtctactaaatagtataatactttattttgcaaactatatctctcagagtacaaggctccacagctagtcttgcaccaaatatatgaggttcttgaatagtcattttctcaaagttctcatctctttacaaagcaagttgaggggggaagcagagagagcactctggtgcttccaaaagcatcagccatccacactctgcctattgaaaacaccaaatctgagcatgtgtgtcattgtccaggaataaacaatcacaaaaaggcatcaatgaggcctataaaaacaagagcgcatgcaagaagatgggattgttatgaaacaggagcacaaggctactaaaagagggcaagcctaaaggaaaagtcaccagggtgagatggaaatagatataggaagaatagtgaacggtggcaaggaagtaaaggaatacaaaagtaataaaatatccattgcattagtccgtccttgcattgctgtaaagaaatacctgagactggataatttataaagaaaagggtttatttggtttatggttctgcaggctgtatgagaagcatggtgccagcatctgctcctggtgaggcctcaggaagcttctattcatggaggaaggtgaagggggagctagcatatcacatggtgagagatggagtgagagagagagagaaagagagagaggagatgccagtcttttaaataaccagatcttatgtgaactcagagtaagaactcacttatcatgaggacagcatcaagacattcatgaggaatctgaccccatgacccaaacacctcccactaggcccacctccaacatgggcagtcacatttcaacataagacttggagaggacagaacatccaaaccatatcacccacattgagggagcaaggagcagactccatactgcagaacacacatgggaaacaaacttgagaagtttccccagggcatagggtaagaggacgaggggctggaaaaagaaaggtaatggatatagaggacagagaatggagttcgaagatacatctaagaactttacatattcctaaggaacccacaaagataaaacaaacagagcaagtatgaaagatgtaatagaagcaaatgaccctgcattgaaaatgatcaaagtatgcagattggaaaggctcacaaattccaataaaaagaattgaaaacaaaaaaaaatgctgcaataacattctttaaactatattaattgtaaggtttttacaaaaataagtactcaggcagtagtaaaaagtttgcgaataaagaaaccaaaattaaactctaacttttcttatgtaataccaaattccagaacttggaaacatatctgcatgctttaccagggaccagattatgaggcagttatttaagattagaaaagttctctttcattggtaaaggcaacagaaagatatattttagaggtagaagctctctaacatagacactattctgccaaaaaaaaaaaataagataaatgtaacaaaataaaatgagcttcaaggtgtattttggtcactgagagatgattcaaaagaagactttgaacaatgagaatgttaacatttaaaagaataggtggaatttttccttactcagtttgttcaataaaatcatgggtccactgtaacctgatatatcttgttgcttaaagggaaagcttggccctaccttttctgctttcttctgtgttcatggtgtagaaaatgtatttttgttaaccaattatttacttcacacttgaggtagactttgttgccatgttggatggctattttgttaggtcaaacagttttctgccacatgcctatgtgattttaaataatgtagccctcaccctgagcttctgctatagggaccacatgctttgtggtaaccaggtgctgccaaaattggatgatagcaggctcctgacccatgcctgtcaagtcataggtggttaaggtcatgggagttggagtcagactgtctggttccaaatccaaggtctaccagttgattttgaccttaattttcttattctgtaaaatgagtttattgattgttcccactcagttcgtttgaggtgaggattaaatgagttaatacctgtaactttttgactggcacaagacacaatcctattacatgttctgaaaaaaaattctctacatgaaccaaaggaatgaattctatttcctccactgctactacaactcaacacttctaatcaccaaatgtgtggaggtttttctacatcagtttgtcagacacctactatgtgtcctataattcagttcagttctgacaccatctacatggaaacaacatccgatcccatggactaaaagctcagtctcataagactgtctataatggctcaagtgggttcttcttgcctgctgcacagaaaaaccaatacatcaaggcagtggtgttgcagtagagaaagcatttgataatcacaaggccagccaagtggaagcatgggagataattcttaaatctgcctccccaagagctcaggggctagggtttttaaggataatttggcagacaggggactagggaacgagtgctgctgatgagttgtggatgaaatcataggagtatccaaactgtcttcgcatgctgagtcagtttctgggtggaagtttctgcgtgggagtcaatttcttggcatgagtcacaggtccgggtggagtcagttagttgccagaatgcgaaagtttaaaaatatctcagagaccaatcttagattttgacaatagtgattttatctataggagcaagaggggaagttaaaaatcttgtgacctctggctacatgattcttgagcagtaactattatagaaaggtaagctagggaacaatgtctggttatcatttaattacacctacatcttagcagaatttaagttcttctcataagcccaaccttgtggactttcattagtcttacaaaggcagtttcagtcccccaccaaggagggcattagtttcaggtagggactgttatcatctttgttttaaagttaaaaaaggcagttagcttgtgatgttagaagaaagatgtcagatttctctcactgtcataatttttgcaaaggtggtttcatggccccacttgaaatgagaatgggaagtccaggttttcacctgtgctttagactgggtggagataaattaaaggttcacaggacctcctcctcagatttgaccatttgctagaatggttcacggaactcagaaaaacagtttacttatttgattaccagtttactttaaaaggaaattacaactcaggaagagccagatggaagagaggcatagggcaaggtatgtgggaaggagcatgaagcttccgtgcattcttgggctcatcaccctctcagcacctccatgtgttcagcaacctggaagctcttcgaaaaatgttcttaagccaggtgtggtggctcacacctgtaatccccgcacattgggaggctgaggtgggtggatcatctgaggtcagcagtttaagaccagcctggccaatgtggcgaaaccccgtctttactaaaaagagattagccaggtgtggtggcacatgcctgtaatcctagctacttgggagactgaggcaggagaattgcttgaactcaggaggcagaggttgcagtaagccaagattgtgtcactgtactctggcctaggtgacagagcaggactccgtctccaaaaaaaaaaaaagaaagaaaagaaaaagaaaaatgttccttcagatttttatgagggcttcattgcatatacatgcccctccctggaggttggtctggaggttgggctgaaagttccaactctaaccacatggttgatttccatggcaacagccctgcttatcattagggacttcccaaaagtcacctcattaacacaaactctggtgtgactgaataacaaaagatgctcctgttacctttattgctcttagaaaattccaagggctttaggggctttgtgccaaaaacaaacactatatatatcttattataaatcacactatctcacattattattatttaaaatgataagtcagtcaagctctcttttcttgagaatttgatttgggaaacttcgagaatgaggcaaggagcagtgggaataggagtttaaagtaagcatagaaagcatagaaagaagctagggaatagattaaggttgcaaggagggataacaaatggagattaggaaatagtggagactgtgattaagcagagcctgtcattaggcatttctgatataaacccagatgctgtcatatcacctcactgaatgcttgccctgaaacacttgttttagtgcagataaattcatcacctaaggatggcttatcctttctatggccattgaacttaagagctccactaaataggataactccctttatgctgggaaatctaccaaaattacctgtgtcagaagggtaagaaaagagaatccaggatccagaatgggattgaagtgatctcccattctttttgtgatatttagactgccttctgcctctccaatcgacagaataaagaccaaacttctacccgggtgggtagggcttatcctgaggatggagactttctaagtatagatggtcaagaaactggtgcacatttaagttagacgcatctctaaattgtctgggcttagactattctaagaatgaataattatgaaaattgaggcagctcagagactcattttctaagatttcaatatatgattagcaaagtgctatagaaaaaaataaaatggcacagtttggcagttggcatcttgtatctttctgtcccaggtctttcttgtgcttgtaattctttcattgataaagaactcagctatctatccaggcgtgatggctcatgcctgttatctcagcactttgggaggctgaggcgggaggatcacttgaggtcaggagttcgagaccagcctggccaccatggtgaaacccacatggtgaaacatctgtactaaaaatacaaaagttagctgggtgtggtggtgggagcctgcagtctgagctactcaggaggctgaggcaggagaattcctcgaacctgggacttggaggttgcagagagccaagattgcgccactgcactccagcctgggtgacagagcaagactccatctcaaaaaaaaaaaaaaaaaggattcagcaatgtgtggttcttttgaatctatggtatgtattagcacatcacagcagagcagaggttctcaacaattgattttattccccaggggacatttggcaatgtctggagacaattttggaacttagaggctgatgctattttggaacttagaggcttagatgctattggtgttgtgggcagatgacaagagagattgcaaacgttctccaattcagaaggcagcctccacaaaaagaattattcagtccaaagtgttaatagtgctgttattgagaaaccatgccctagagaagcagcctagaactttgagtttttccttttttttttttcaatcaactaatgagaataaatgtggaggagacgggcaaaaatgtcagcagccccgtatggttttcaaaatcatttcagatatttgctattcaccagtgtcagccaatgtgtttatttttgaaaggtcagaaatttcatagggccagattactaaaatggttattattatttttttgttttcaagagcttatgttagttatctagtatagagaagtctaccatagagatccctttgttctgagtactggactttttcacttaccaaaactctcctactctatacgttcttcaccgtgataatccaagaagtctgaatcctccccatggctctcccctgtttccatccccagtcggtgggtttcccacaggtctccagtgtgctttggaagtaggaactcctaacagattcacagtttgaacatggtagtcctctgagctgttcagtattttaaatctctctgcagttagttataatcattcaactcttttagtcattcttctaatgtcagtatagataactaaaagattgtaatattagaagacctatttcccagagaccacaaagacaatctcatggaagtcccactgtagtaaatagagtctattttctacccagcatctggtagagtaattcagacatgtgttttgacagtttgcctgaaagtaacttgacaaataattttactaaagaatcctagaaagtcaatggcaacattttgttcattctaagttgttcaagccacgtccttagatgtggttgattcaaatttcttcagaactggaaaagcacaagagaattagtattccagtaataaggaatcatggattgtggcagtctttttaaaacataaactagtttagcacataagtggtggcctagtacattttaaagtggagtccaagggaagtttcttgaattgctgtagttcttatggtgttctgctgaagccgtgtagatcttatggtgttctgctgaagccgtgtagatattgatcatgctgcctcccaccaccacccccttcattccagatctgctcaaagacaacttagaaggtcctatcctggtctcctgtctgaaacatatactttctctcctcccgcccccagcctgcccatactattccaatccttctctacctattattcctttgttttgttttcaatataaaaatcttatctatttctttatacgttaatcatctatcactccccacacactacaatgtgtgcattcattccctgagtaactgaaacctagaggcccgggagtcatttttgaaacttcctttccttggctttctcctctaactgctcttccaattcatcggctggatttgactattctaattccaaatctgtctggaactcgtgtacctctcgcagtgtccactgctgttgttctggtctggggcacaatcgacactcatgctcaccgaactgcagcagcccccttcctgctgcttattttgaccacacctctttttgaacctattctgtacaaaggagctggaaagagtcagtaaaaatacagagcatagtgttcattgccttgcttggacaggacctgccatatgtgtcttctctatagtattggctgaatgcataaacagcgagaaataaatgtgtagagagtaaattgatagaaagctgccctcagtcatctcccatggagagggctagtgatgactggcgaaggtcacagagctactatgtgttagattttggactaaaatccagtttttctgagaacggtcaagagtttatttatagaaaacatgctgctttatctcttaattccttctcactccctgcaaattagtggcattttagtttacttaaatgcacaattatttttaattttgattgaaaaattaatactcatttacttctgaaaactatttctttaccgaagagcatagagaaataagggagtaatttatcaacctaccataggtggaatttttactttcatctttatactttcttcttcattattgttttttttaaaaaacgtaagtatgcatttatttttataatcaggaaatatgtgaagttatataaatgtgtaatgaatttcattactgggaactaactgctggtgatattttacacttgattttagccaaaaggccgagaagcgatgctggtgatattctaatgtactataacttattctaatatttcatgggatttatttgcaattagtgtgatataaatttccataatgtatggaaagatatattagaagatgctaaccatgggcttaagaaagtagatttcataatttgaaacacggcccacacaattaataaatataagacatttggcactctacttctaatctcttgattttttttatagcaactgtctttaagaaccccagcatattcatggattttttagaaacctaattatttcctagaaaaatcctttgaaaaaggaaaattatatttgacagttttctaaagattttctgtgcagaagttgtatctggatatacatataaagccctgaagtaatctatacattttatcgctggtcttcagatatgttggcagagtcgctcgtgaaatatatgcttgaaattaatgtaattactctgacatttgttattttaataagcattcttagctaatacatagaggaatacattaaaggaactctaacaccaaaattatcctttcttaattaaataagaaggactgcaattatttaaaaagtgtatgtcaaatctaagttgccttcaaatgtaatttaattttctgttacttacattttaaaatggccatagcttttttcgttgttcatctttcttaattctttaggcactacttaccccccaactccagcaaccaaaattaatcctaatttgcatcacaataatttaaaatagatcaaagaaccaatttcatagcctaattcaaaagcatcatgcgaccaatatgtagtattaataaaacatatttctggttttgccaatccaattttttttttaattaagtgcttaacacagtgcccagcacagaaaaagcacttgatacatgtttggtaatgtctttgtgactgtcatttttactaatgttgtatattggtactactaaagtctaatgggatgcttgtattatggtgtgataatatagttaggatgaccacttgtcatggctggcctgtgagaatcctgtttaatatctattgttccagttttctccaacttaacattttagcactcaaaagtatgtgatgtggaggataaattttatggtcgccaatcctttattgtaaagaatcgtgatgcaaaggctccagtgtagtcatcactcatctcttgatttaggcatctaagctatccaggcatcatcatgggggtgagcagcctgaatgacagtaagctttccaagtatggggacatgcacttaagataggtatagttattccagtgccaatctcctcttacctgctgtatgtcaagaatcaggcaacatttaggaaatgaaaccacaagtctttgtctctttttttaccctttatctcaaaatggtttttacttgggatttgtttttttgttttttgttttttgtttttttttttgagacggagtgccgctctgtcgcccaggctggagtgcagtggcgcgacctcggctcactgcaagctctgcctcccaggttcacaccattctcctgcctcacctcccgggtagctgggactacaggcgcccgccactacgcctggctaattttttgtatttttagtagagacagggtttcactgtgttagccaggatgatctcaatctcctgacctcatgatccacccgcctcggcctcccaaagtgctgggattacaggtgtgagccacggtgcctggcctttagttgagatttgattatgaatgaaaatgtaaagaaatttgctagatgtgtccatcttttcatgtggcagacaatatggactagatatatggtggtcaaaattatgtttgtgggtatagcctaatagcctaaaccaatgacacttatgtggcagttttatttatttattttttctttttaagacagggcctcactctgttgcccagtctggaatgcagtggtgcaatctcagctcactgaaacctccgcctcctgggttcaaatgatcctcctgcctaaacctcctgagtagctgagattacaggcatgagccaccatgcccaactaatttttgtatttttagtagagatggtgctttaccatgttggctaggcttgttttaactcctgacctcaagtgatccacctgccttggcctcccaaaatgctgggatagcaggcgtgagccactacgcccagcctcaccctggactttatgacaatgccaaatatatgcactgtgtcaaaaacagtcctcttcactgtcctccagtagaaaaagctcaataatgggtctacaaactcctggatttagtccaggctatgtaatttgtggaacttagtgccaaaagtagggtcctttgttcaaaaattattaagaatttccagatggcaacagtggaacagtcaatgaagcacaggatccttctgtccccaaggtcctgaacaactgcagaaaccttgtgcccgtgcattcatccctccttcttggatcctttacctgttgatctccttcgttttctttccagacaacaattatggacaacttattattaatatatgtgagccactgtgttcactatcggaaataaaaatatgcttataaggtagtcccaaatctttttttttttttttttttttttttgagagacagtctcgctctattgcccaggctggagtgcagtggtgcgatctcggctcactgcactctccacctcccgggttcaagtgattctcctcccgcagcctcctgagtagctaggattacaggcgtgagccaccactcccggctaattttttgtatttttagtagagacagggtttcatgatagtggccaggctggtttcgaactcctgacctcatgatccgcctgccttggcctcccaaggtgctgggattacaggagtgagccactgtgcctggccccagatcttagattttggtgattaaggacttcacgaagtagatgaaataacacccagaatttggctggtttattttctccttaagatgctcagctgtgattttctgtatattagtctcaagctgcaaattctctattccaggatcttatgatctgtgtcctaactacatattatagggccccagtggtccctatgcctctggttctattgtcatcacacacttcctgtttcattcctatagacagatttattcatgactagggaacagattatgctagtaaaggtgttggttaacatgagtttaaggcaagaacttaaacgtaaatatctctagggattggacaggcaatatgccttaaatagtaaagctatcaggtagggattgactgcatgcctgcagaggaaactgctgcctatttagccacagaagattattgccatgtaaaaatgtgagtatggtttgtcacatatttttaaagaaaagtcagaaatccaaaaatttgtatgaaatttttaaacattttatattgtcaattcaatttttaaaaagactcaatataggcagagaaaaataactacagcccaaggttaagccaagaagtattgtttttctactttttcttcgtagtcagatttgttcagatataattcagatgtaataaataaaccctttaagttctatgagttttaacaaacacctacattagtgtgacaatcactgtagacaagatatagaataattctctcgtctcccctccaaaattctctcaagcctctttgtggttaattctcctagctcctgacaatcgctaataaatttcctgtctatagttttgccttttcaagagtgtcaaataaatggaacactactgtatgtagccttttgagacaggcttctttcactgagcacaaataatttgacttattcacgttgttatatgtatttagattgtttctatctaattttcaaaggttttttccttcctttcttctcctttcctccctccttccttcctttctttttttcttcttcctccttttattctgccttttttctctccttccaactttcccgcttttttagatatcacatgtacagaagtagattaatcttgatgtttatttcataacatactctcatttgggcccatgcatggcttgtatttcaatagctctattgagataaaactcatatacattcacatggagaaacagccctgtggagggaaagaaattgatatgcagtaaactacacatactcatttacaacttgaaaagtttgccatatgtatacacaatgaaaccatcaacactttcaaggtaataacatatctcagtttccttgtgtctttatgttattcttccctccttccatctgatctgctttgtgtcactgcattttctagaattttatgtaaattaaatcatatagcatgtgctcttttttttgtctggcttctttcatgcagcacaattattttgccattcatatcagtttttgtgtgtatcaatagttcattctgtattattacaaattagcattcaattacatgaatacattgcaatttattcatttgtgaatggacattgcattatttccagttttggctgtgacaaagattcatgtggaagtctgtatagggacatatgctttcatttctcttgggtaaatgtcttagagtagaatgcctaagtcatatggtagatgtatgtttaacttttaaagaaattgccaaattgttgtccaaagtgtgtaccattttacattcctggcagcagtgtatgagagttctagttcttcaccatcccccttccaacacttgctatagtcagtcttgcaattttagccattttaataaatgtgtagtgatatctcactgttgttttaatttgcatttccctagtgtctagttatgttgtgtctttacttttgtttatttgctatcattatcttccttggtcaaatatctgtttaataattgatacattttttattggactgtttgttttcttattagtaactttggagagtgctatatatattctggatacaaatcctttaacaaatgtatgatttgcaaatattttctcccagtctgtgattgtcttttcattctcctagcagtcttttgaagagcagatgctcttaattttataaagttcactttatgtttttttttattttgtggattggacatttggtgttatatctaaaaaaaaatctgcctaacccatagccttatgtgttttcttctagaagttttatagttttaggttttacatttgggtctatggtccattttgagttaatttttgtatatggtataagatgcagattgaagatttttttttaatatgtggaaaactgattgttccagcactatttattgaaaagactaatttctccattaaattgtctttgtacctttgttgtgaatcatttgcctatatatgtgtgagtctatttctgaattctcttttctgtttcagtgattcatctatgttgatgccaatgctacactgtcctgataactgtagttaataaagtcttaaagttaggtagtaaaagtctgctattttcttccttttcaaggttgcattttcctattccaagtaatttgcattaatcaaaaagtacatggaaaatgtgtattataacaaaaggtatggaattttaaaattttcaaaattcttttgcatcaaagtaaatgtgtactaacttgttataatatgtgtgaacaggagctagtttgaggcactaaaaaggataaatcatcaatttaaaaacagcccctatcagagcaacatgaattctgataaaattgaagcaagaacaaatatcaaatttatcgtgaagcgtgggtgaaaaaagggtgaaatcattgatgctttatgaaaaatttatggggaaaatgtcacattatcaaacagataactcattttaagaacagatgatatgatgttgaagtcgaagcccacagcagcagaccatccacattaattgataggaaaaaaattcatcttgtttgtgtcttaattgaagagcactgatgattaacagcacaagtaatagccacaaccatatacacctcaactggctcagcttacacaattctgactgaaaaattaaaattggccaaagtttccactctatgggtgccaaaaccattgtgcccagatcagctgcaggcaagagtagagcttttgacggaaattttaaacaagtgggatcaaggtccagaaagatttcttaaaagaacattaataggagatgaaacatggattatcagtatgaccctgaagccaaagcacaatcaaaacaatggctaccaagaggtggaagtggcccagtcaaaataagagcagaccagtcaagagcaaagatcatggcaacagttttttggatgttcaaggcacttttcttgactttctggagggtcaaagaacaataatatctctcattatgggagtgttttgagaaagtcaaagcgttagcagaaaaacgtctggcaaagcctcaccacagagtccttctccaccatgacaatgttcctgttcattgtcacgaaacaagctctcacgaaataaagctctaattttgcaagaatttcaatgggaaatcattaggcagccaccttacagtcttgatttggtttcttctgactttttgttttctaatcttaaaataatctttaaggggcacccatttttccttagttaataatgtaaaaaagactgcattgacataattcaattcccagggtcttcatttcttaaggaatggactatttggccggtatcattgcttacaaaagtgtcttaaacttgatggagcttatattgagaaataaagtttatatttttcattttaatcttttaattatatttttccacaaaatttttgaagtcctctcacatatataaatttttggaatcagcttatcaagtcatgtacatttactgctatatcacactctgttttgtgaatattccaaaattatagtctatgatttatattgttgtgactattgcataatttacatatcaatgtactgatgatcatattttgcaatatttttgttattgttattctattatgaacagtgctactaatataaatagtatttgccacctcatacacaggtgcaagtttattgtaatagtcttagtattaaattttctgagtcatagtttagcaaaagctcaacttttcacaggatattgctggattgttctccaaagtagctaagttatactcctattagccgtatatgagagattctaatcatcttcattcttcaacatttactattttcagacttactaattttgccagaaaaaatacatgacaattcatacccgtacctgtagtggtcttgatttccatttactcagaagacattggacttttcttcttatgtttatgggctatattttcccttcttttatgatattactgttcatgtttttgctcatcttattgggttatgggccattttattttatttttattttttatttatttatttttttttgagatggagtctcgccccgtcctgcagactggagtgcagtggcactatctcgactcactgcaacctccaatgggccattttatatcctaacatatgaagtatctgttcaaatcttttaccatttttttcctgtaggtgtgcttgtccttttcttgttataataaaacagttctttatttttgatactaatcttttagaaagtgttctgttgggctgggcatggtggttcatgcctgtaatcccactctgggaggctgaggtgggtggattacctgaggtcaggagttcgagaccaacctggccaacatggtgaaactccatctctactgaaaatacaaaaattagcccggtgtggtggcgggtgcctgtaatcccagctactcgggaggctgaggcaggaaaattgcttgaacccaggaggtggaggttgcagtgagctgagagcatgccactgcactctagcctgggtgacagagtgagactccatctcaaaaaaaaaaaaaaaaaagagagagaaaagaaaatgctctgtcagtggcaaatatctcttactttttttttagttttctttgaaacctcttttaatgaatagaaatttttttattttaatgtagtttaattcatctatttttcttttttaattgtcttcagtttctttagtcttgttttcataatcttctggatatgagtcttgcaaaacatcttttgttaattttctcatggtttttgttataatagtatttagagttattttatatatttatggttaatataaatcaaattgcatgttgttcttgctctaaattacagattcaataatttgcaacaaaaccttatctctttgtaagtccttaagttaattaagtactctggatatcttcacatataaatacttgtatcagctgtcttctctcttactactccaattaaaatccagtatctagaatagggaaaaaccaggtgaacatcacccttacagagatttattttaagacataatttagggtgtgctccatactgccttggctatgtactagtctatatattctagaagggtcatatatgtgcacaaattgatttgtgtagccaaaagctgctccagtataaatgtgccaccaggatccatttcaaaacattgcttcctcttgccaaggttagtgcagctatgcttgctatcactcaagtaaccagagaatgccagcgtccgtactctcaaaaagacagccttttctgcaccattacaattggtgtcttttgtccctttcttttcactgatggaaatcttttttatcattccaatcaaagatcactaccttcctaggagaagtttcaatagaaagaaaaaaatgttatacttcctcagaaaaatagcactttcttcatatagcaagttttactttcagaaaagttgagaaaataaatactatgcccccaggtttcccgttattggagattgattgctatgttgaatgtgctatagctttgctgcttaaacccaaacgccaagtgcaggagtatcttctttactaacgcatttaatttaccaagcacacttagtggctggtatttcttacctttctaagggtgcactcacttacactgccctcaatatatgtaattaggataaaaccatagaatggaaggcattaaaaatgaggcaggaaagcacaggcagagtgggatgaagccagctttgctctgaataggacttatatgatcagtttagttttattccaaacatgaaccccaaattcaacccctttgacctgagtactccgtcccttaaatggcaaactaaacattcgtgaaaatttaatggtgaggaaatgagtaccttcttaagtttcagatggtgaaatggcaccaggggagcactttcagtggcaggcagaagtgtgtggatgtgctagatcaaacctgaaatatttgttccttcatcctgcagtccctctccaaactagccagccactgagaccttctgacaggacacccccaggatgtcacccaaaaaaggtatttacaaaatcaagactgtctgtaggacactatgtctttctgagaggtataaaggtatttgaaaactttggaaagtttgttttacaatttttgttccctcttttggggctttccctttttcatttttttctgtgggtagtttccctttgtttcctgagaaattgagaagggtttaatatctctccaccttcttctcttttatggatgaatgatttcaccaactggtaagtgctaaaactgacctcgctttcactcagaaagacaatggaggaaaggaaaatgcactgagatttcagcatagcaactcaaatgcgggctttattccacagcagtgacctattgtcagattggtgtgtgagacagtttttgaaaggggatgtgttctgcttccgtttatgagttaagcaaagttctaaattaagttgagaagaggaagcaggtaaagtcagggatagcagagaaaggagacatcaaaccctattgttgtaggatatttatgtgaaggaatgagcaacgtgataaaacacatttttgcttgctgtgacttgccatagggtgcattttcagtactgtgtggataatgtgtggcatgttcattcatcagtcattctgtgacatttatgtagcttacacttggatctattttcaacaacatttcagttccctaaagacaaactggcagaattttcaaataggaaaaacctggacacacacatttgcttttctgtatagactgtctagtccagataatcttgctatcagtcattttgttagcttactcatttaatcttagaatggaaagtggaaacagagacctcatttagagataatctagtaaagccatccagcttcaggctcatatcttgggaatctgagcagtaccctatttaatatgctcattttattaactttaaacacctggagaacatcattattgagaaggtcattgcttttgaaaaaacaaaaacaaaacaaccacttcttatgaggctctacacatctttccaaagaagctattggaaatggcccaaactttcatattaactcttaacagggtggcgtggtttttcattagtaagaacaggattcaaatcttatggaagatggtagatttcaacaccttagcatttttctcaaccctgggatcttcaagttcctcaggctatttaggtagttatagtgctggcaaactttttaagtgcccagtagtttttacaaaaacttgtaataaatctgctcaggctatcttaattgccaaccatctcattaagcaagtcaaattagaatggattattcctgctgtttattagtgctgcatattatttatcatttattaaccttattgtgctcacatagcaggtattttaaagtttaacagctttattttaattatgaatgtaatatatgctgttgcagaaaatatgtaaactttagagaaaatgtactaaatgatgcactgatgaaaatacagaatcccaccacaaaaatattattatcaacatttgggtattctcttccaaactttttatatgagagttatgtttggtttatacataataaaatgggtaaaaatcaataaatagaaagcaaatgtttttaaggcagtacttgggcttcataagaatggaaaaaaatgatagacttgcctggtgtggtttgcataatgtcacagaatcataacaatagctccattattgagtgtctattatgtgccaggttctgtacaatgttcagtgatgcgtcactgtgatgactagaggtaaaggaaagataagtgatgccttactatgatgacttccaacaagctatgaagggacagaacaagcctttttttttaacttttattttaggcttgggagtacgtatgaaagtttgttacataggtaaacatgtgtcacaggggtttgttgtgcatattatttcacacccaggtacctatgtccagaacccaatagtttagttttcttttctcctcccctccctcattctatcctcccccctcacatagaccccagggtctgttgtttccttctttgttttcataagttcttatcattatcatacttataaatgagaacgtggtatttggttgtctgtttctgcattagttggctaaggataatgtcttccagctccatccacgttcccacataagatataatctcgttctttttttatggctgcatggtatttcatggtgtattttatatatatagatatatagatatatatataaatatatatagatatatatataaatatatataggtatatatatgtcacatatatatatcacatatacaaggatatgtcctctagctccatccatgttcccacataagacataatctcgttcttgttttatggctgcgtggtatttcatggtgtattttatatatatatatctatataaaaatatatagatatatatatcacatatatatagcacatgtatctatatcacatatatatatatatcacattttctttatccagttgggacagaacaagtcaactggcaagtccattgctcagcttgttgaaatactctgcacagaatgcaaggaaaaactgttttcatgaggtagcccatgaagcgatgaagcaaggcaaatttatctgcctggataacctcctgtatgctgttttcactccatggagagtcaacacaacagacttctgagttgtattatcgagctccttcaacagggcattgctgtaagatcctagatcccacactccatggtgtgatgttttagccaagtctggaagtagcacaggccctaaaatctcatgattgcaggttgtcaactctgctgtaggcttgccacttcaagggcaagtggttggttggggctgggatttgggcagagccatagaaagaaagggaacattcaagggaatttgatgatgtgcatgatgtctctgtctgatacaaaaagaaaaaaaaactctaaaaacatttgatacatagaaatactagtatttggtgagattgaatgtgggaagatgagggataagaaggtattaagaatgactcccaagtttctgacttggtcagttgagtagaagggaaatttttatttttatttttatttttaaaatttcagtaagtttttagggaacaggtggtgtttggttacatgaataagttctttagtggtgatttctgagattttggtgcacctatcacctaagcagggtacactatgcccaatgtgtagtctcttatccctcaccccccatcctttcccttgactccccaaagtccattgtaacattcttatgcctttgtgtcctcataatttagctcccaattgtgagtgagaacatatgatgtttggttttccactcccgagttgcttcacttacaataatagtctccaattcatgccaacatctattattttttgattttttgatcatgaccattgttgtaggagggaggtggtatcccattatggttttgatttgtatttccctgataattagtgatgctgaacatctttccatatacttgttggccatttgtatatctgagtagaaggtaattctaataaataaaacaggaaggcagcagaaagaggtttgtttgggatatggcttgattatttgcaagatatttgctgtagcttaggagaaaggtggatgttggtgatactgattttgtcattatctgtgagttaaagtttctaaaatcacgtggcttcctagggaaagcatatagaatgacaagggaagatggctagatggctagtaatggcaccctgaacaacttcagcatttagaggtgggtggaggaggataagcccatggaagaaacagaaaggatgggccagcgagatgagaggagaagctaagggagtagacagttaccagagggaaggtgggatcagttaagaaccttagtatgttgcaaagaaataacctgcaatgcggaccaacccggggaacgtctgtaaaaatgatgacaattcttaattgtaatttaaaatgtaattgtattgagagctctctctgtctttgtctcatcataatttgaagcagattaactacatattagctagaaaaagccctttgaaattttccttcaatgtatcaatagattctatgactttttgtaagtagaaactgcctattggtaaaatagcacttaattgagataatgcttgtgaaagccatttctaaactttgaattgacatacaaaataaaggtggcaatcatcaccatgttgctatactgtctttggccatataaaatttttttcaacaatacaaagataagccttgtacaaattcttcaaaattctaaatttgtggtacttgaataatgttttactatatataaagatgaatagatagcatttcctacaataaataaataatttatatatcaatgtgttgggattataaattctcatagaaattcactttattaattcattcattcatctgatcacagttcattcagcaaataatttgttttgttctttttaagtgctctgggaagaaggtattgtgacagagtcccttctctcaaagcgtttatagattcatgtgtttggggaaagtacagaacaattattgaaataaaaccagagtcaggcacattgctatgccagctataaagagcctatgaaaattaggaacattgacacatttgttcctaacctggtttgtgctttcaggattcctctgaagtggcagcactccttgggtttgaaatgttcgtcagtaatgactgatggacatcaacaggtgaatagacacacaaaaaacctatgaaacttacataccataggttactattcaacaataaaaagaaaaactgttgatacatctaacaatgtagatgaatctcaaaagcattatgctattcctttggctgataaaatggtgacactcctttatttctctttctttcatcccacttttaaaatcagccttagtatactttaggcacaatatactatatacatttaaaatgacaatttgacaagttttgacaaatgtatatacattataaaaatcatgataaagatttccgccgcctcaaaatgtttcctcatgccttcttggaataaatccacacattccttccttctctacaccccaccacccatatactctacctctagacccaagcaattgctagtctgctttttgtcagcgtaaattagtttgcattttctagaatttcatattaatggaaatgtacagtaagtactcttttgtgcctgacttcttacatttagtatagtgcttttaagatttatccaaattgttgggtgtatcaataatttgtttctttttattgctgagtagtattctattgtatacgtggttcacagtttatccattcaccagttaatggacattccagttgttttatatttggggctgttatgaataaagctgatgtgaacatttgaatagaagtctgttgtgaatgtttggattggaattgctgggttgtacagtaagtgtttgattaacttcataagaaactgccaaatgattttccaaagtggctacatataattttgcattttcaccagcagtgtatgagatttccagttgatcctcatcctcattcaaaacctggaattaagagtgaatcttttaaattttagccttttgagaaaatgtgtagtggtacttcattgtagttttagttcgcacttctctaatgactaatgatgtttaacatgcttttatatcttcttttgtctccatctattctttgttcttcattctcttttcttcctttagagtaagtattttttattttattccattttcactattggtatattatctataaattctttgttgttgttccattttagtgggtttacaatataaatctttaacttatcacagtctgtcatcaaataatggtataccccttacatatgttttaggaaccttacagtggtaaaaatatcagttccccatcctgtacttgttgctattgttttcatgcattttattctgtatatattataaactctacaatctatcattattactttttgtttaaatattaaattctttaaaagagatttttaaaaataagaaaatagtctttcatattttctcatgtatttgccatttttattgttttttttttcttccatatttgagatccaaatttctatctggtatacttttccttctgcctgaataactacctttagtatttttttgtagtacagatctgttggcaatgattatctgaacttctgtatgtctgaaaaagcctttagctaatttttgaaagttttttgatggacatatgatatggtttggccctgtgtctccatctaaatcttatcttgaattgtaatccccatgatccccatgtgtcaagggtgggaccaggtggaggtaattggatcatgagggccgttcgccccatgctgttctcctaataatgagtgagtctcatgagatccgatggttttataagtgtctgacatttcccctgcttgcacttctcctttctgccaccttgtgaagcaggtgcctgtttccccttcaccttctgccatgattgtaagtttcatgaggtctccccagccttgctgaactgttagtcaattaaacctctttcctttataaattacccagtctcaggtatttcttcatagcagcatgagaatggactaacacggtacatacaattacaggttgctagtcccttttttcccttcagtgctttaaggatttcactcttccatagtttctgatgagtagtctgaccattcctaactttgtgccattattttctcatttttttctgactctcccttctgggactccaattacaaatatcccagacttcctaactttggcaggtcaagagatcgagaccatcctggtcaacatggtgaaacccagtctctactaaatatacaaaaaattagccaggcatggtggtgggcgcctgtagtcccagctacttgtaaggctgaggcaggagaatggcttgaacccgggagggggagcctgcagtgagctgagatcgcgccactgcactccagcccgggcgacagaccgagaatccgtatcaaaaaaaaaaaatcattcaaaagattactgatgcttgtttcatttttttttaatttttcaactggtaattaatttattaaaatagttgacttatacgtctacaatggtgacttccatctcaactcctggctcaatactgatggaagtaatctgcttaacaatctcagaaggactgagcaagtcaatgagtcgcttgtggattctcatctggaaatgatcccatggcttagaaccttcaccacatggagttttttcttgtagtgattctcaaagtcttagtaggcatttgaactggtcttttcactttgagattcttttcctttgctcctctgatcaagtcagcacacaccttcgccagggattttacattgcagcttgttagagtgattcgaattcggtgaattgccatcttcggctccgtgggtgtttttccggtatccttaaaagccatcactgctgcgcggcttcctgacctacttgttccggcaagagtgaacagtggtgagtcaggagcaggtgcgggcggatcagagctccacaacacctacgaccacctcttcttcaaagaggtgtttcatgttttaaaatcttaatttccttctgtttcattttggataaaatctgtcttcaagtttggtgcctttttttttgggccaatatctaatctaaagttcatcctatccagtatgtttctcatttcaaatattgtattttctatctgcagagtttgatttgtatttgaaaacgttttttaatctttctcattgtcttaaacatttggagtatacttataataattgttttactgttgttatctgttacttctatcatctatgaaattactatatctgtttctattgattgatttgattactattctggttgggaggcaatattttccctacttctttgcttacttggtaatttttttatcaatgaaaatttataaaagtgaacttcatttacaattggatataatgaattttacatttttgtgtcctggatttttctgtattcctttaaatattgttggatttcttttttttcccccctccgggatgcagataagtttcttggaattagctggatgcttttgagatttgcttttaagatttgttagggtgaattcagagcagggctactttgatctaggaaatagccctctgaagggtctcatgttctgtgagataggaggtctttctcctctgactggttggtagcctaagctattcctgattcttgtaaggtctggacactgttctgcatactcttttctgatagttctttccctggccttagtagttaccacacatctatgcacatagcggtattcagccaaagtttgaaaggattcaaagatctccagagctctctctgtatcactgtttctgttattctatcccacaaattctaagtgtgtgaaactccctgaaatcagaactatgtctcctcaactcagtgagaccacaagccactgtttgggtttcccctgcccatgttgcagcctagaaactctcctcaggcaaaaagatcaggcaacatcggggtcatctcatttccttccctttcagagatcactgtaattgcctattgaacaatgcctgaagaaagatgtttcatatattttgtctggctttctagttgcttaaggtaagaaggtaaatgcattcctagttactgcattgtggctgggagcagaattccaatactgttttttttataatatgcttttacttaattatttgaggattccctttagttatcataattttacatgatgtaaacaggtaaatgagaatatcttcaaaatatatttttcagttttggggtggttctctcagttctggtttttgccaaatataatagatttttagtatctgagttccatatgacaaaatttataaatcttgggtgtatccatatggtatgttataatcggaaaagatagatgaaattccgcttttgtctaatgtctttataggtcttggagaaacttgaagaagggttgtaaagtccataactttacaatgagacaaaattaaaagaatccaagccaaaattgtcctagacaatgaaaagtatcgctatgcagaagccaaatctcttaagctcctccaccatatcagtcatgacacagtctatagtttaacaattgtttcaatttggaaattaatttttagtactaatttaaatatttcatattagtatatgagaattcttccttctgttcaggctgtggtatggggaaaagtcagttcccatcaatgcagattcatatctaccagcacagtgattaaattatcctcatatcctcttgtgtttgaacaagctgtgtacttttaattttaatggatttaactcaatattcaatatatgttgattactgaatacaacaaaaagtgtaatagacactccttgagaagctcataatctatttgggcagatggaacaaatacttagaaaaattgaaaggtagtttaggaccacagtaaaaaaaaattgggggtgcaggatataaagtatcaattgaattgtagaagcaatatatactgtgtattttttcacctgggtgagagggtgagactccgtctaaaaaaaaaaaaaaaactatggttgttcaccataactaaacatttaatctctttcagtctatcttactcatctacaaaatggagataatacctgttttgcagtgcaggccctgacatacgggtagagttccataaatcctagcttctattccttaactcttttaactcttttcttccttccttctttctagctaatttttaactctctatcctagacaacttttgctaaacgtgtataacatgtagtacctacgcataggaatatgttttatagaacagaattattgaaaacagcttcttacatttctgttattttttcaaaagcaagaattcatgtattccttctgagccaagtacatgcaataaaaagtaagagagattcagaaattctgatgattattctcccaagaagagtgcttgctagagtgagggtcttgcagacacagaaggagctgatggggtgaactgctggggtgttacaaaaggccttcgggaaaatacgtaatctaagtcaataaatcatagagtgaagattccctcagggaaaaagggagtggttctgaagaacttacaaatttttccaggcaatagccacagatgctagcacaagggcattatggccacatagtgtgagcaaaagtgcttaactttttgcccttcttctaatatttactctattagcccagacaacatgagatccagaagcctcatgatgagtggagaggaaatataaatcagaagaaatggtcaaaaagatgcctatattcacttccgcacttaggtctccaagcctcagttcctggcatgagtaggtagaggagaggagcttggaataggatgtgagattacagttttaatatagactggactggatatttgaatacctgaaaatgaatctgaattctcaaaatgaggtggttcctgcaactgaaaataacaagaaagctacaggatcttctgccatgttatccaggggtggaaaagtgaaattcagtggagccaggttaaagatggagtttgggccgggagtggtggttcatgcctataatcccagaactttgagaggccaaggtgggcagattacttgaggccaggatatcaagaccagcctggccaacatggtgaaaccccatctctactaaaaataaaaaattagccaggtgtggtggcatgtgcctgtagtcccagctactggggtgggtgaggcatgagaatcacttgaacctggaagggggagcctgtggtgagtcaagattgcaccactgcactcccgcctgggcaacagagcaagaccctgtgtgaccttgtgtccaaaaacagacaaacaaacaaataccatgtggagtttgtttactctttaaacaaatatccttcatgtgttgaactgaactataattatagttagtagggcacatagcaggttttaataagatatctagttcttcctcttaaggtaactcgttagaacttttatgagaaagaactaaagaatttctaatggggcagctaatccactcttttgtgcactctgttctgctgatgatctgatgttagtcggggtttctgtttgagattcctgagccttaactgctgatgacagagttcaaaatcattgctttctaactttgagaatgactgcctaatatgacatcattttctacccctgagtgctaatagtctaccttattcctcctgcctgtccttctccttgaggaggaggatcatcaatgcactgtgtggattgaagtggcttcatacccttttgatgttaatgttctcctttgcttaaagtgtgaactgaatatggatccctcatttatgaagcaccatgacacttcctgggtaatgaacaattaaacagacttctcagcaatagtgactatttttctgatttttcacttcatggacaatattgtatgcaagttaaatttgcaactagcttgaggcttcacacatggtgagtttgagaaattgaattctctacctcaaatgtatttccttttccttgaactctacattcaggtcagctgtccagttcttaaacaacaggttttggagaggcaatgagtaataaaatagcattttctccttcaattctatctgcatttgaaaaaaataaccttttatttttgattcaaagaagagaggagttttcttgtctttctacatctgttccaactcctccaaatgcacaaaaattttttcagagcattccagagtttctcagactgcacatagaagattttgcatatagatacatcttggccataataaccttctactgaattagtagaaaatagatgtattctaggttttcatatctttatggcaatatgaatagacaaggctcttcttgcaaaaatatctcctgaactgtgcgggagatgcttggaagacccagtcaaaattacgaagtatcccaagtttgtatcctcctgtggcttccccgtattacaataatgtcattctgatccaggttccagtactctcaagcccttgtccttcccttttcattttagcttgcattcatccaagtatttggatggaaattatcaataccttatacgagaacgtatgggaggctgaggcgggcggatcacgaggtcaggagatcgagaccatcctggctaacacagttaaaccctgtctctaccagaaaaatacaaaaaattagccatgcatggtggcacgcgcctgtagtcccagctacttgggaggctgaggcaggagaatcgcttgaacctgggaggcagaggttgcagtgagccaagatcacgccaccgcactccagcctgggtgacagagcgagactcatctcaaaaacaaacaaacaaaaagaatgtaaatgattgggagttaaaattatgcttttcagttttcagccatggatcatgttttcttgccttgcctgattcctagagtctcactccatgatgtttcctctttattataaagattagatggctttgcattgctgccatgtggcatttatacttctcaagcagctgtgtcatcttattctaccgtttaaacttagttttactttaagtccacatctaaactgtttgcctgcatgcccagcactttttccaccctctacattttatttgactggagcaatcaccttagcctctctaggtctttgcttatcatcactctgctcattcttcaagcctcacttgattactgcctcctctgtgttgctttcctggatttcctcagtaagacatagtttctccctttcatacttctgtggtattaagtatgcaccagttacatgtgactcatctccaagtgctttggcatggagatattatttatgttccttatatgactactgaccacttttttctagactaaatattgaaacacttggccagataattttgcttaattttgagtttccttttatactttttaaaacaaatttttgaaattaaattacattttgttaggttgcaaatctgaaaaagtccaaggatgaggtgagtttgttgtggtcagttgggtagttgctaaactcatagctggtttgtgtctgctgaccagcacattgttagcctagagaaagtctacatggggaaccagattatgatgcaagcgttgcttggagagcccttgatcaagagcaaaacaggttggtagactcgagggatagttcagctaggtctgatggaacattccagttttgccaacagaaggaaaaacattggaagggcttatcttccccaggatctggatctgttccactgggtaacatttaataagcactaacatggtctcttctttcacttgccatttcctgtgcttctttttccaactactacatctcctttgacacattttctttttctttttctttttttttttttgagatagagtcttgctctgtcacccaggctggagtacagtggtacgatcttagctcaccgcaacctccacctccccggtccaagcgattctcctgcctcagcctcctgaattgctgggatcacagatgtgcgccaccacactcagcaattttttttttttttttgtatttttagtagaggcagggtttcaccatgttggccaggctggtctcgaactcctgacctcaggtaatccactggcctcggcgtcctagagtgctggcattacaggtgtgagccactgtgcctggcctctttttaagtgtatcaataccatcattttggctgcttattctgccctgggagccattctgtctctttaggaagtttttgcgtgtatcagatctcatcttttatattttgatgtttaatagcatttaaaggattttgttttgtgttttttaaatgatttgaaaacaagtgtgctcactaattaataaacagcagattcaaacttttgttgctttttcaagaaaaaaatgaaaaattctgtaacaatatatcttagccataaaacacttgtaatcagcactcctccagaaatttcaggatgtaagttatcttaatgattatactagaaaatcttggaaagcagggatatggctaactttttataacatgtatccctactgtcacaacaagagttaagacttaataaatacagtcatgtgttgcttaacaactgggatatattcttgtaaccacccaaggggttcattttgcctgctacctggatacagccaatttatcaagaaccaggaattgcagtagagaaagggtttaattcatacagagccagctgaatgggacactagagttctattactgaagtcagtctccctgaaaattcagagggtagggtttttcaaggatagtttgaagggccagggaatggtgctgctgattggttggagatacaatcatagggatgtggaaaatggtcctcatgcatttctcaagtccactccttttcttagttcctgcttagcggaggtgttagaatttgcttcttggtggggccacaggactggttggtgggtccaggtggggccaccagttgtcagaaatgcaaaaacctgaaaagacatctcaaaagaccaatcttaggttctgtaatagtgatgttatttgcaggagtaattggggaagttgcaaatcttgtggctaatttgttagtcctacaaaggcagcctagtccccaggaaagaagggggtttatttaaggaaagggctgttatcatctttgtttcaaagttaaactataaactaagttcctcccaaagttagttggacctgtccccaggaatggacaagggcagcttggaggttagaaacaagatggaatctgttagtttagatctctttcactgtcataattttgtcactgttaacgtttgcaaaggtggtttcactgtagactttataaacaccatatacttagactatactaagtttattaaaaatatttttctttctttagtaacaaattaaccttagcttactataagttttttactttttgaagtttttaatttttttgaacttttgactcttgtaataacagcataaaacacactttgtacaactgtacaaacatattttctttatatacttattctataagtgctttctattttcattttttccctttaaactttttaatttaaatgaagacagaaacacaataccctaggtctacacaggttctggatcatcaatatcattatccaccacctccacatcttgtcccactggaagatcttcatggacaataacacgaagctctcgtctcctgtgttaacaatgccttcttctggaatacctcctgaaagacctgcctgaggctgttttatagttaatttccttttttacaagtagaaggagtacactctaaaataacgattaagagtattgtacagtaaataaatacagcagtaacagagtcggttattatcattatcaagtattatgtactatacctaattgtgctacatttttgtatgcctggcagtgcagtaggtgtgtttcaccaggatcaccacaaacatatgagtaatgtgttgatctatgacattaccagagctaccatgttgatataaacaggagacagggaaatactgggtagaagagggcagttccctggcaaaagccttactcccaagcctggaaacctgcagtcctaaatgggaataggcattcctgtttgtgcatccaaatgttgccttttggcctgccatgcccctctgtcctgtatccatataaaccccaaatcccaggcttgatgagcagatgagcagacaaacagaagagcagaggagcagaagagtggtgctgcagagaaagagagaagagaaggagcatctgaatgtcaagaggagtttggatggggatggtcagagaggagatcagctgcaggacagccaaactccaggggaagatcatctctcactccatcccctttccagctccccacccatcctgctgagagccacctccatcacccagtaaaatcctcacattcaccatccttcaagttcatgtgtgacttgattcttcctggacactggacaagaacctgggtaccaagagggcactgagctggttaacacttaagccatctgcggatggcggagctaaaagagcactgtagcacacccactggggctttgagagtcacaggcacacacccctagatgccaccgtgggatgggaacccaaaagtgctcgccctggctcctgcacctatctgtctacatgctccctctcctataacaggcttgcacagcagtgactgcgcaacagatgagccacaccccttccacatgtctgcaaggggtatcagggaactctcccctttcaatgtcagtaggtaataggaattttttagctcctttataatcttatgataccacctttgtgtatgtggtctgtcattgactgaagtgtcgttatgtggtacgtgactgtatttattgagtggatggtcaattgtatgaggtacttgaataatgagtggtgtgaaccttggttttatgacatcttctgagagctgctttcaggtgggtataagaagagatatttctagtctaggtccccactccttttcttagttcctgcttagtggaggtgttagaaaaaaaggttggactctggcactattttcctccattggttatatggactcaaagccataacttaaggaagaatgtctatttttagatttggtgactgatttagataggttgctacagaaagtggtacaaagatatttcacacatagaatatcaaatccagggtgctttagcactgcattccaatggcctgggatggatgggtggaagccctggcaagctgaaataaaccagggcaagctcctctttggaattcacaagtctgacaactggtgactcaggctctagtcaggagacctgaatgttacgtctggcatcacgataccttagtttacagagattaatctaacaggccttcagttagtttgctttattttaaaattctgcttagctttttgttgcctactaaatttctcctgatgtatatttagatgtaggtgaaggctgtagatgtatgcactaccaacaccagcttctgggagggaacattttcccactcacaagcaagtgaactttgctttctccatgaagaagaatgacctgcatgatggctttcagaagtggagaacatggctcacagttccctccacagttcctccatggcctttggttgcatcttctctgaatggaggagcttgggttatgtgaaaagcagagctaccagactacataaatgttttagtgagaaggcagcaaattaaaatatcagaaattttgaaaggaaaggtttataatagttagatttaaaacatactttgaggccaggcagcgtggcttacgccagtaatcccagcactttgggaggccaaggcgggaggattgcttgagggcaggtgttcgagactagcctgcactacataacaagaccttgtcctgtctctattaaaaaaaaaaaaaggaaggaaagggaagaaaaagtgctttaatattcagaggcatgagagatgcaatgagtaatataggaccttctctaaggacactgggggagcactctacagaggtggttctaatctagcctggcaaatctctgttcccttcatgccttgtacttccttcttctttgtgactttgctaatgttattccttcctcttggacaaatttcctatactaaccaaaaggccccaagacacagggggaaatgtggtaaatctgagactggaaggaaattaccatctaatgtcactcttgtacagtataactattgttaatattattgctggggtcactcatttattcatatcacaaacactgactgagtgcctattatttgccaagcatgggcaataaagagttgaagaccaacaaagcccctgccttcccagaagcttatttgcttgtggggaaaataaacagtggatcaattaacaaataagtagataacataatgtcacggccaggcgtggtggcctcatgctggtaatcccagcactttggaagactgaggtgggaggatcacttaggcccaggagtttgagaccagcctgggcagcatagggaaatcccatctctaccaaaacaaaacaaaacaaaacaaaacaaaacaaaacaaacaataaacgaaacacatggtggcgtgtgcctgtagtcccagctactcaggaggctgaggtgggaggatcacttgagcccaggacacagaggttgcagtgagccaacatctccccactgcactccagcccgggtgacagggtgagaccctgtctcaaaacaaacaaacaaacaaaacaaccaaaaaccaaaaaaagtaatgtcagatggtgactgttttgaggaaaataaagcagggtaggggaactagtgataactggtagatttgggtttctccatctctggctgcttttgcatcctcagtaaggtgagagtggcaaaggaaattccaggttgactttcgggttcagtgaattttctaccccgtgtctcttcactgccctttccctccccagaacctctaaaatctgatccttagattctgcaatgtaagtcagcttccttcttcctggttgccagctcactacattcttattcctggataaaccaaaaatctcttccttgttttcatattttcaaaaagatgtagaaatctctcacctgctcatgttccttcctttttgtcttgttggtatatataccttttacaattctttcactaccaaatgtagttggatattgggatgtagtcacaacaaacacataaatacaattcaccatttttaaatggacttattcatttagtctgcttaaaattgagataataacacacgcaccagttgggtttctctgagaactctgggcatttttaatcctggcaatttttaaattgcttagcagtaaaacagtcagacaacagcacctattgttataaatccctgcctcttcttacctcaatgaggctatcctttctctctatcaattctgtcagcagaattaagaagagccattgatttccagtttgttcagcgtttttcttcttaggatgggagtgatgacttctaacctctttacatctagagactcaatttaagtctacttctttcattcagccttctctcttcattttcagctgcctggaatgtcttctttctctcagttcctatctttgacattaaaaatcacagtacttagttatattctacctcacaccaatcattttacttgttaatatcttttttcctagttagattgtgacattttggaataaaagaaaaatatccttttttactttatagctctccagatttcattagattagtatagattcgagtgccttttatatatcaggcaatgcctagtgtataatatttttacttatgggttttagcatttaacttatttaatgatcacaacattcctatgatgttatttgttttcataatttgttgaaatgaaagctgatggtcagaaaggttaaaaagttgtctggtcataatttttgaggaggcagagctaggttttgaacgcaggtctgtctgattctgagaataatcctgtgctccttcagctgaaccacacagcccctcttagtgctttgtctccatagacactaagtgtattcttgttgattgagtgaattaacgagtgaattatctggagctctttctgcttctgttttcttctctgtacaatgaggatcatcacatgaacctgatctaagaatagaatagtccaactgagttcccttaatttggtaaccaagagagagtagagttaattaactagaaccctttgccatcacttctctctaaacttttcatcattttcctctaaaagtccggtcctgagctctattacaagatagaacattttagcctctatcgaagagagcactattaatattttatggcattggctccttttttcctaatactgtgggattaaaataatgtttactaaattctggatgttcgattcctgttttttcatgatattttataatccaggccttcttcatagagacacagggctatgttttataactgccagggtcaagcaaagaacagcttgtgtgagatacttaaagaaatagctaagcagtaacttcagaccttctgtatattttcctcaaaattttctctcagtttttgtctccctacaactcatttttagaaaacaaaaacataacacaattttgcccttttaaaagataatacagctgggtgcagtggctcacgcttgtaatcccagcactttgggaggctgaggtggggcagatcacctgaggtcaggagttcaagaccagcctggccaatatggtgaaaccctgtctctactaaaaatacaaaaattagctgggtgaggtggcggcaggcgcctgtaatcccagatacccgggaagctgaggcaggaggatcgcttgaacctgggaggcggaggtagcagtgagctggaattgcaccactgcactccagcctgggcgaaagagtaagactctatctaaagaaaaaaaaatgtactataataatttacaaagtacagaaaatatctaaaggaaaagaaataacatctcacaacctcatcatctagatatgactgcaaaaattttggcatatttcatttcagcttttaattaatttatttttgcagaagacatttatttcagatattctaactttataatctgtagaattttaatgatatttttgtatgacatctatcataaacatttctgcatgtcattgaaatatttataaatgttatttttatttaaacaatgcataattgatataacccttctcttaaaattggtgatttcacatacctggggatgagccgatgtgaaacaaaagagaaagggtaagagatagctagtctcttgactcatttttttttttccatatgacttgaaaaaaagaacttatcttagagacctctagaatagttagcacaaatagatttctcaatgtggttaagatgaaatacagatactgaatttactcttttatgtgaaataaataaaaactggataagatatatatagcaacagttttcaagacattatacctcagacaacaaaggataatgacctctgagagagggaaaacaaattaggtgagcctgtgattgccccagtttactgcctggagagagattccaggccagggtgcagagagaagggttgcgaatggaaactattgctctttctgagttaaggagagagacctgaaagtctgcaggtacaaagatagctgcaattcatgagaaagagttccagagaaaagaaaactgaacagagagtgagctctggatttctgtagtgttcctgctgactcttctgctgaatcatgatcagtgcatgtgtgtggctggagaaagaacctctgaaaaggtttagagggacaaatccttagaatcacataggcctgggaatagctcctctttccaccagaaagagtataaaaaccatgaaattcatgggacattaggtagagtacttagaagggttttgcttcagcagtgagaaaaaattagtcctagaccaaatgttgctctgatcctaacaaaacttaaaaaatgagaccctaaaggataaaactgtttccaggtaacttaaatatataccagaacaaagccgaagactataggaatatgaaaatatctagcagtcagtaaggtaaaattcataatgtctaatatgcaaccaaatattaccatgaatataaagaagcatgaaaataaatacccataattccaagaaaaatcaattatacataattgccccatcaatgacacagatgatgtaattagtaaacaaagagctaattataactgccaactctagccattacacatgttcaagtggctagaggaaagatcaaatcacgacacagaagaaataaaaagacaataaaatatgtacagatgaaaattacaatatctgagatgaagcataagcgagatgggattcgcagcagattagatatagaagaaggattaatgaacatcaaaacatgtatgacaacagtagtataaagtctgtaagaaaagaaatggaaacatactggtataaggttttacactatgtatgaaatggtgtagtatcacttgaagagagactgtgactaaagaccactgtaacctcttagggaaagaaaaatatctttttctacccatcctgggttcacagctgaggccactataacaaaaaacagattaataacacagaagcatacacatttacttaatataagtgttatgtgacacagtagccatcataaggaaagaagactcaaagaaacagatctgagtatttttatagtaggtttgatgaagaatggatagtcatggagaaatataatggggcatataatacaatggggttatgatctaatggtagtaaactgggggaaatttagctgggtttgcttgttcagatttttctccttgaccttttgtcgtgagagacaaggatgtttcttttctctgggtatagggagggcacctctcacatgagggacttatgatctgcttcagagaagtgccagggaagaacagagtgaccgtcctgcttctgcagttttctcaaattcatacagcttaaaatatttaacatgctaaggtgttacattttggggtagtatatcttgatacccatcacctgaaaccaaccactttataatagtaacacaaagagttgtacataatataccataaaggtggtaaaatggaatcattggaaaagtcaattcatccaaaagaaggctgaaagaggaaagcaaaaacaaagaagagatgggagaaataaaaattaaatggtagggacatgagcatccattaattttggtatacaggaggggcttgaggggtgtcctggaatcaatccccctcagataccaaaggatgactgtatattttttaaattaagagactttcattctttaaatattcttgacttacagttttttaaaaagaaaaaaaatcaaagcatagtatagttgttaaatcattttaatagtatattcagtggctgaaatgacagggagtatcaatcattatttattcaatataaagttatccttactgaaaaaataagatataactgggaaatatgcttggatccctcacacatccacttaatttcttaaaggaagaaagatgaaacacatgtaagaacagaaacaaataaaccatttactgtaacattccaggaattgtgggatccttttcttcccaagtttatttatttgcttatctttatctcctagtggtagtttgtttcctttggtagaatatatggcagtcccacattggtgacacctggtgctcccttcatccaactggatcactttgagattcagttttacacctttttagcattttctttgtgttcatatatcagttatgatgagccactgataatattttgttctaaaacgaaacatattacttagtactttttttattgtctcgctgacttttaaaatttgagtgatgtacagactttgtttttttaatgaaatataaatattttctcatggtttctaaattccttataaaattaaattaattcaatctgcaaaaatattaaatggtaagagaataaactcatcacttagatgttcatattaaatgtaaatggcctaaataccccaattaaaagttaaaaatggtctaattgaataaaatacccatatccaactatatcttgcctataagaaaatattgccacttgcagtataaaaatacaaataggtaaaagataaaaggatggaaaaagacatactattttaaactaataaaatattaattaattaattagtcagatttcaggacctttttctgaataattgatagaataaacagacaaaaatatcagtaaggatacagaaaacctccaaaatattatcaatcaccttgaattaattaatatttatggggccaggcttggggctcatgcctgtaattccagcactttggcaggccttgagctcaggaattcgagacaagcctgggcaacacacacacacacacacacacacacacacacacacacacgtgtatatatatatgcacacacacacatcagctaaaagcagcagaatacacattttcttcaagagaacacagaatatttagcatgatatgctatattctaggccataaataaatctcaacagacttaaaataattcagctaatacaaagtatattctgtaactacagtggaattaagtttgaaattaatagcaaaagatatctggcaaatccccaaatatttggtaactaatatcatacttctaaatgacccagggtcaaataagaaatcaaaatagaaatttgaaagtgtttgaactaaattaaacacacatttcaaaacttttgagatgcaacaacagcagtatttagaggaaaatttataatagtatagacctatattagaaaagaagatctcaagccagtgatctcagtttctacctgaagaaactagaaaaacaaaacaaataaatccaaaataagcagaagaaagtaagtattaaagaccagagctgaaatcaataaagtagaaaacagaaaaacaaaacaaaacaaaatttaataacacccaaaacttgttattatacagatcagtaagattgataaaccactggtcaagactgattaggaatttatcaagaagaaacgatttcctttttttcatactgtatatgtagcacccaaaaataaataactttagtataacatttattcatctaatacagaagacagaaatgagaaaagtggcatcattacaaattctacagatagtaaaagaacaataagataatatgataaaaaactcaggccaataaatttgacaacttagataaattgcacaaattacttatatgacacaatctaccaaagttcattcaggaagaaattgataatcttagtagctgtatatctattaaagaaattaagttgatagttaaaaattatcctacaaaacgtattccaagctctgactgtttccctagagaattgtacccaatatttaaggagaaagtaattctaattctgcgtaaacttttctaggaaattgaagaggaggaaatatttcccaactctccctgaggccagtgctactctatccaaaaccagaaaaagacattccaagaaaacaaaactacagaccactgtatgcaagaagcaatcggaaattaaaaattgtaaaatatcatttaaaatatcagaaaaagtaattatgaagtacttaggaacaaacctgacaaaagtggctcaagatttgaacactgaaaactataaaacattgctgtaagaaattaaagagggcagaaataaatggaaacctcatttgtgaattagataaatttaacactgtgaagatattaattttccttaaattggtctataattcaacagaatctcaatcaatacctcaataggcttttaaaaatgcttgcaaaatttgacaagctaatcctaaaatttatatgaaaatgcaaaggacctacaagaggcaaactatctttgaaaaagaagagtaagtttggaagacatatacttgccctcagagctcattataaagctacagtaatcaagacagtgtgagactgaaataaagatagacaaagaaagacaatttctaggtcatgagagttatgtttcctaaaggaaggcagcagatgcttattaactttccccgtgccctcaggatgccttaaacagtggttgccaaccactagcagctttagcaccacttggaagctttttagaaaagctaattactgggcccatcccagacctactgaaccagaatctctgtgggcaaagcccaggaatctgtgttttcacaagctctccaggtgataatgatgtccattaaagtttgagatccattgccttggcctttccctgctagaaatcctccaggatttgggagacaggggaagaggtctggagagagtggcagaattcaacaccacagaatgaagaggaaaattgatggtctttgtccatggaatccattaaaatatactctcattgctgccaggctgagctgatgaataaaaaataagctaatctcaaatcaagccatcaggctattgatgataattgtgttttagggtgagcaaacagctttaccaagctcacacagttgagacaatttgttgtttggaactatcttactgtaagatccttaagaagaatgcagaagtatgaaaataaatccaggactcagaaatctttcaactaaatctttaaaattctctctctcatgcacacacacacatatgcacacatacacatatagtaagatttcatgacacatgagacaggatgtgaagctgaacagttcgatgaatgcctgagtggtaagatcaccttgaagaaccagaagtgagggtctattctagctgggtatgagctacaaactcatttcttggggaacacatgaacacatcggggaggctaagtagcttctgaggctactaatagaatttcagtcatttctcctgtcatctgaaaaatatatgatattgaatttctaaaaatgggtttagtgtagtctagtcttactgtctaaaactaagatgtggcttattccaataaccaaagtgattccatcccatgtgagggaaaaaaaggataatggtgaattaaaagcacctgcgtgtatttgttgctcctttagaggagtctctcttcatcaacgttaactttctttcctacttttgatctggctgctaaaagtctaggtttagatctcaaaccattgtccttctctgcatgatgtaatagttacaattacagtctcaaccctctggcatttaatgaagatgaaattgatttctttagactgaaaacaaaaaaatcacttacaatcaggatactgaatatggtagcaagtacaaggtcccagcttctagtagacttggcagactgtcaagctcttactaagtgaccccaccccatgcctttttgtcttttctgttgccacacaattacaataatttgttctctgaatgccagagtactgacaaggaaaggaattctgaagctggctgagagaagtcgtgtaaatctcccaatctaggctccattgactcttgtctctttctttgtatggaactgattttataatttctgtggcaatgaaagactagtacccaaaatgactgctggtcctttgtttattgatcaatctgagcatggactagaattcatcctccaattggtaacaagaaaaaattggatggggaagcataccattggctaaggcagcacagcaagtttgaatttggctgcctcttctttcaatattggttgacatcatcaagagcagacattggcgttggagttaagagtatcaagagagttaataaataccaatttagggtaatattttatgcctagtctttatcttttggtgaagtggtttctaatatcatctcagactaaatcttatgggatatttctacttgtagatgctaaggtattaagaaaaagctcaaagtagttgtgttttccttatcttcctaaaagtttagattaaagatgccaaaaatttgtgtgttggtatgtgtcaaagcatttgaatgcccttgtagactattaaaacctttgttctgtaccaggcactgtattgagtatattgcatgtatttattattatatttagttctcacagcaaccgtacacaataattacaattccttcctttcactaaggcatagggagtttaaataaattagccacagtacaggatggcataaaactgtagcagagccaaaactcaaacatgtctctgtctgactcaaaaacataggctcattctcctagagccaggcaacaacctgaaagctcttgagttgacttttctagttctgtggatgaatgcaatcatctcaggacccagataaacagaagtccttctttcttattcgtatttctcagtactaggccagtcaggacaaactctgttctccatggccgtgatcttgaagaaattgagatttcatccaaaggaaatcaggtattgaaacgtgtgtttatgtgtattgattaatcttctgcctgtttctggaaacatttgaagaaatataacaaaaagcaaatatcctgaaactgcctaatgaacctgatctctctctctgtctttccctttctctctcataggtcttttgcctgtatttctctggtggaatttactaaataattatatcaggtgtcttcttattgtacttgactgctttcatcaaggtaatcttgaggacagagacttcctttgttagccagggcactctaggggaacagaaattacacacacacacacacacacacacacacacacacaggaactggttcatggaggctaaaaagtctcaaaatctgcaggccaaaggcttgagaacccggagtcctcattgtgtaagttccactcagagtctgaagaggggagaagacagatgtcccagctcagagacctttaggcagagagagaaaattctgtcttgctcagcctttggttcttttcaggcctccagtggattagatgaggctcacccacataggggaaggagtctgatttcctcagtctaccaatgcaaaggttaatctcattcagcaacatcctcacagacacacccagaataatctttcaccaaatatctaggcactttggcccagccaaatagacacataaaattcacttccacactttcttactaatccgtgcattctctccaatacagggcacccggcctggcaaggagtaagtgctccatatatatttactaaatgacaagagatgagattatccttagactatgactcagatatagacaatcaattattaataccctatcatttttccccactctgacaacccaaactgaaaaatgttgggattgccttttttgacaatatgattttctctgaatgcagactcatgttttgaccttccctgtctgttcctgtttagtattcatgctggcttaactcattgattgatcaagtaaccattgagcatctgccgtgttaacactctgaacaagatcctgtaatatgaatggtgtttagcctgatgaataaagtgtggtgtctgtgcattcatttttatatatttattgtttttaaccaaactttacccatgtaaagaataacattgatggcaggaacttgaatttggatctacgtacatgttccatttcagactcaccatgaaatgaggtgcttgcatttttcattgctgattttacaatacactttcacaccttttgggtaaaattttgcaatcaatgtaactgaggcagcatggtatgaaagcaaccctggaggtggaaatagaagactagaatttaaatcttggttatgccacttattggttgtatgatttttgtcaagtcatttgacccgtgtctattcagagtttctttgctagaatgaaggagttaactagaatttattgatctcagtagtcagtctcctcaggcacagataaatcttggatatgtatcctgagatagctttcccatttccacattgaagacaacattctattttagagcaaaaatgaattatattatttaagaatatgagtttcagaattcagactcatgcttacgggtttgaattctagttctgccactttcttactatgcagactttagcaagtcagttaatgtttgtgagcctcaggtttctcaccagtaaagcagtgtgagtaataactatcatattatattattacaagcataaaatgaaataagagtacttggcacaaagaaggatcttaatttttagctttttaaaaaagctgtatttgtttatatgcagtatgtatatatatattctcaattctattattatagactatatttattatgtttttcataaagtcattagtttcactcaggaattagttgacccttgtgagatacatggtttgaccacttttcactttgatgttcttcagaaaataagacaattagaaatctctgattgtaatcttcatgtaaaatattttacagtcatggctaaaatgatcccaggagtggaatcatacacataaattcttttctttattctaataatgttacctttagtgtctatgccaagcaagtatgttatgtgttgagataaaaattcttagtatgtttgtatgtgacattcccaactcccatcccactgaagtctatatttacctagtttctttcttttgttttcctctaacattcatgctattttaatcaatgttctttcattttgaagcccccaataagtttgaccccaaagactttcagtttgcccctgctattcataagcatacttatgacaatgcatgtctcccattcttttctcatatttacaccgatctttttattgggacaaatgggtttgttttttcatgcttgtgtttaatatctcactgagttcagcataagttattaaacataattttctgttttctctttctccctcaagactttctttttctctagacctttatttcctaactccagagtatttgcccaggtctataggcccctctctcttttgctttcttaccaacccatccaccttcttctgtttcctattgcccaactggcttcacttaaacaagagcatttgttatttgtacagagtgcaacatataattgtcctactctgtttggttgctataacaaaatatcatagactaggcagcttataaacaacagatatttatttctcatagttctggaggctggaaaatccaatatccaggcactactggcagatttggtgtctggtgagagcctacactctggttcatagacagccatccatttgctgtgtctccatatggtagaaagaatgaataaagtttctggagtcttctttacaatggcactaatccattcatgaaggtttcatcccatgacctaacaataccattgtattgggggttatcttgcaacatatgaattttggggaacataagctttcaatctatagtaatgaagtaggaaattttccctgatcctttcatgggcaggaactggagtatgcctatttcacagaggtcttatcagataaaaaaattctccattaaatggcaaaacaagtaaccatttgggattcctgggtgtacagtgcctactattccaaaatgagattattgaggctaacatgaccctttgtatacaaagacgggggcagaaataatatttctagcaaatccacacatctcaatcacatttaatttcacaaaatttacttctaataagcattgttccaactaacaaaccatctggtgctagtctaagatagagatggctgaagtgctcctgattccagtattttaggtgttaaatctccattctaacattgtcaatccttaactggagtactcaaatattaactaacttcctctaggatataaattaatatgtataccacattctatgtgaattattttaattatattacatgccatatacaaattatatataggtttagtcttcctgaatattgcaagttgagtctgtgagagaaaaaattaggatgaattgagaataactagaattcagaattctttttcattaagtgttgactgtgttaactcatattcccggttaggtagcaagtcctatgaagtgtgattttctcctaacagctaaaaagcagaaaaaaaatggatttattctagttaatgacttgctttttctatttttatagaaaaaatgaagtaaattatttcacttttcttgatgctattactattttgtcaggaagatagatcttctaaattttaggaaactatgaatctaagttctatattgctctcatttcctttttctctttgtctctcttctgttgtagcccctccctcaccgctaagccttcaccctgactctaccctgcccccactgccttttgttctttggaagacactcattaacatttgctaatgtatgctaatgagcaataattagcatctctaatgtgaacaaaagcagtgctacaaaggaagggtaaagatgtgtacagagttcagccagccttttatgcttctttatgccttaggaacaatcctcttctttcagttctttcacaattctttagtgttttttgtttgtttcattttgtttgcttatccatgaaccctgaaaaccattcttcttcttgagttagaatattgcaaaaatgctacggaggacagaaagattcctttttgtcctaaataacccaaggatataagcacagctgctaagaggttataatgcacatttgtattttcatctggttgttattttggtatcctattactagaaaaggttttaaccagaaaacctcacacaagataatgtatttcattttaccacacttatttacagtggttgccctttatggtggtaattgcaatgtgaaagcatacactctgaatatatattatgacagcatggttaaataagaaatgttccctccctcaaacaatctaaatgcaaagaaaatgcaagactcaccacttactttttcataaccacagagggctctaaatgtctttgtaaatagctatttatttattgaatatgtatagttttttttttgaaaaagccagccctccaaaccacatagagtaagagctgtttttgttctttctgtagactgatggtgtcgtgaaatacctaattgcagtttctcacaaatactccagcatgtaatttgccatttgcagaaccaggcttcacatttcatatttgctcttccagctcaggggtggtagaatttggaaacataccagcaacccacttcactcagcctgtgtttaattataatttcacgtacaataaaagcagaaggaaaacgtgcaaaaaaattggtgtgcatccctttcccctccttcttacgtatataaaaaagatttatttccattgtaaaaggatagaatggggatctttattttgagtagattttctatttttgttctttctgtttgcctcagagttagtgtcctctctctgtgacctcagagtaaaatgtgtttctccataggcttcatcctgttctatttatcaactatattatatttatcaattattttatattgtgtttttaataaagcagacatcagcagctatttattttctacttctgagggcctaaagagtctcagaaaatgagtgtaatctagaagggaaaacattgaagagtgacagctattataacagttgtgatttttgcctgcctccctcttttggattggtgagtcctaccaaaaaccaaaactattattctccttgtaattttgaaaccacagagattgaaaataactatttagtatctccaagatattataatgtttgaaaatatgaccagttttgggggcatttattacaaaagtttccagtagggtgtttttgaatgtctgtgccctctggttttcacaaaactggtcttaaggaagataagatactggtacacacagaagaaatatcagcctacgtctgtctcattaaatcttatccccagatactttgatgatatttaagtgtaatgatctcattctgtgtttctcactcctgataattttttaaatgtcttatagcttacaggtttattaaggtatttgatttatttaagaactacataattattctcttcattcaatggcttctgaaatattatgtttaattctatcatttgaaggacttgggattgttataaacaaatggcacgagcttctttttgtcctgacctagaagtagcaaagataaagggagctgcttagttaacctgagtgagatttaataatcttgggtatattttattctagagtaagaagaattgcaccctattacttttattcagttttgtatgcagtagcttctgttgtctacttcacaaccaccaatagtgttatcataaattcagagtgttgggctgtattagcccattcttgcactgctataaagaactacctgagacagggtaacctgtaaagaaaataggtttaattggctcatggttctgcaggctgtacagaaagcatggctgctttctgctctccagcctcctcatggaggcctcaggaaacttacaatcatggcagaaggcaaagttgaggaaggaggtacctcctacatggccggagcaggaggaagagagagaaggggaaggtgctacacacttttaaacaagatcttgtgagaactcactattccaggaacagcaaagggaaagtctgcgcccatgatccagtcacctcccaccaggcacctcttccaacactggggattacaattagacatgagattttggcacaaatttgaaccatatcctgggccattctctatatggagatgatgcctgaatatgatttggtgactcagtctagcatccaagtggctcattgttgggcaattcttctttagtcttctttagggctaattttactcattccttttgaaaattggattgatttactttttgtttggttttaagaaagcaaaatatctaaatgctgttcttggcatagcttatatacatatacatgcatacacatgtgtaattttcttcagatcaaaatatgcatccccatcattcgtattgctataatcagaaattagtaatttgaggggcaactgaatgaccttatacctagagttttcagagtataatattacacagtgtgtattcataagaatgctgccttttaaagaggtttttttttaaaaaaatcatagcttattttttatagtttcactggtctgtcctcccttttctctctttttttcccccttgagaagagagatttcacatttttgttaaggggctcataatttccttatgaaatatgacaaatttcactttatcttaaaagcaaaatattaatagtacagacagctgaaggtggtctgagttaacctgagttacacattttatatatatatatatatatatatatatatatatatatatatgttaaaaatatttatttgtcatatgtagcaagactaaaatgcaaaattttgctttatgcttattcttttccagtatcatttactgtaattctcaccccatatttatttttttacttctctttctgtttctctcctttctcctctcattctttttctttcttttcttctccctaccccatcttttagttccatacttttgaattgctatagtggactcaaatctaagcaagaggtatattagtaagttgttcagtcttttaacaaagtatcagtcagagaagcacagcccagggataaaccaaaagcagaaataaaactgaggaattaataatctaattcgtgttgttttctttacattataggtggttcatttcatagcctacatcttcaatttctcaattctcattagatctttcttaacagcatataagaccattctaaatagcaaaaatagctgtatccttttactcactgcccatcagttcataaagccacttgaattcagctttttgcccacacaactgcactaaacatatgcctgccaagatcatcaatatctctacattgtcaaatccagtggtcaattttcagtccacattgtacttagcaacttatgatacgtctctgatgcacatcttctgccatccacaatctctgactttccttctacttaagagctgattgttcatttttgatttcttcagtttgttcttctcctgttcctcaccattttgagtctcctttttctgttttgtttaccctcattttctttgttatctcatctggtcttatggctttaaatacaatgtttttgctgataattccctaattcatatttccagtccagacctttcttctgaactccaggctcaaatattcaactgcctacttaatgtcatgcttggatgtctagacagcacctgaaatccaacggatctgattaaagtcctgatctttaacagctcctacctaagctattctccctacagtcttccatcttcttttcctgtaattccattcttcaggtgctcaagcaaagaacctgttgctatccttgatttctctatttctctcacatcctacagggatgacatgggttcatttatgcctgtcatgccactgattaacatccctatcaagaaagtttagtctgaggtaaaaacatccaatttgtatgagaagggccaacattgacattcttcgtacacaaaaaagaatcctgagaagaaacacaaaagagctaaataatacattgctgttgcagcttaggtaggctggagaagaaacccatacataatctcaaaccttactgttataaagtcattcttttttttttttttttttttttttgagacggagtcttgctctttcgcccaggccagagtgcagtggcgctatctcagctcactgcaagctccgcctcccgggttcataccattctcctgtttcagcctcccgagtagctgggactacaggcgcccaccaccacacccggataattttttatatttttagtagagacggggtttcactgtgttagccaggatggtctcgatctcctgacctcatgatccacccgccttggccatttttttttttttttttttaagagggagtcttattctgtggcccaggctggagagcagtggcacaatctcggctcactgcaacctctgcctcccgggttcaggtgattctcctgactcagcctcctgagtagctgggattacaggcgcctgccaccaagcccagctaatttttgtgtttgtagtagaggcggggtttcaccttgctgtccaggctggtcttaaactcctgacctcaagtgattcatccacctcagcctcccaaagtgctgggattacaggcgtgagccactgcgcctggcctataaagtcattcttttgcatcaaatagtaagactcattaaaggcagtggtattttcttttactgtctacaaacccttatccaagagcattttctctatattcctttgtgagcacacaataaatggtaattcaataagtgaattttcagtttccaaaataataacctggagctataaacattgcttcaagaagtaaatgtgggtcagagaaaaaggcaataccattcaactcttctggccacttggtcactgtgttatcctgaagaagcataaactactttcagcattatagatttaaaaagaagccccagaacaacatccacttttctgaacgactcctatgcctctgaaatgtgacattttgctgttgtttctttttactgtttttaattactgagtctatctgcatgaaatgaggatctgggttgcctaggagttcatctgctcctattgcatattcctcttttaactacacatacttcaatgcagttttgcttgctgcctccaacattttgacagacttcccctcctcttccttcactatcctcccatcactctccaggagacaaggttatttttaaagtgcatgatcaatgggcattggggagcagctgaggcatgaagagatcatacgattgggaataaggtactagggactgctgagagaaggaatggcaacatgccatctcagacattgtctgagaaaggaaagggtttgtagctcccattcaagtattctgagctatctcttcacacaggtttttgtcttggagggagttcttaacatagttctttagcattgctttaagttgaaggagatataggccagtgctgatagttacttttcaggccaaataatgttccattaaaatcgagcttgctctgaggatcttggtagtgtcttaaatctcctggtcatagtgctgctatttggttcttgatgcttatgacacctttgctgagggtttgaatcaagaacaaaacaagtattatcacaatgactataaaacatgactgttccacgatcagacaaaggaatgctgttaagcaaagaaggcacctaaggagaatgtggagatgaccatgcacagaccagaatcactattggaaaaccaactcaagaggagggactgggtcatttctgcagcagtcttcattgcatcactgagaaattgcagctctgttttagttctctacttgccaccacagggaatatcttcccttatggacttttaggttttatttaatggttatttataaactattccttctgtgccggagaagatgattcatgactctagccctgctttttctctcccgtggttattagaggaaactgagttgttgcttatctctttagcttgggataccttattctgctctttttatttaatatataatctttcctaaagatttccttatatttttgttcatttagtaggtttttctgttttatttaattaactttatattatcacattctagtgaaataatcatcacaaatcatcctaatacatcgtgcaaatgttttaaaaatgtgctttggttgtgcatatcgcaaagtaggctgtgggtcagcatttgctatttgtcctcagctgtttcttctttatatataactgataacaccctgctccaatgttaatcttatatcattaaaattctttcctagagaatccttctttgactgaagaagcttagtggtgacattaattgcaaataaaagaccatgacctattgtagaatgtggaatatctccttagaagtgtctgccttcattattgcaaactttcagtagtgacataaagatctttgtcctgtgtagtttcagttgcagccagcaacagaaggcatatgttcactttgaacaaaagaacatttattttcacattctgtggctgatgttgagtgataacatttttgcatatcctaaaattttttacccagatgctgtttaaaggcaaaaagtgcttttacaataatattctttgtgaatggaatttacactcttggcatgtgttgccttttcaatatgcccatcaagttctgaataataacctttgacagtgagtgaacagaaacaaaaccagaggttgtttcatctgttcacagcaacactgtttgtcatctttgcttttttggaaaaatgtcattccaccttaaataaaaatatgataaaattcatgttttataagcaagttaatagacttcgattattaagaaatattttaatttttccaaggcaagaaacctgtgatgaatgaacattaagttgacaaaagaaaaaaatatgccaataaatatattttttcatattactgtagtgtcaaaaattttataaaacttttatatgcctttataaaaatgaagcaaagctaagaagaagatgctgtatgtgttatggggtgaggaataaacagaaaaagtgtcctttgtcttggaaagaactgtaaaatcacctatctccatgttgccaaagggaatcacatattgggaaatttaggctatattaatataatacgtataaaaataattgaaatagaaaagatctggctttaagcatttttctaaagactttttcatgcttggtaaaagtgtttggaataaattattctctatttttaagtagttaatttggttattaacctaattggtatgggcatgtggatatagctttattaacaattcaatttctcatgaaataaaataacccgacaaaccccaagtctacttattgcaatacagaatttattttggttgaagttattttgaattgagctgatagcttataactttgaattgggcttataactgttatgttttgcaaatccctgaagattatgaaatagaaaaatctttgcatggcattgtataagatgctgtagctgtatatctttaataaatcgtgctcattttggcaagtttatggaaaaattgtattaactgcacaaaaacattatgataaaaacaataaaagtaaaaaccacttactaacaattgtacaggcatttaaataattgctgtactgttttctttcctcaacagtacaaatcaaagtggaggaaaaagaagacgagactgaggaaagctcaagtaagtggtgatgggccacttgggatacatttcctatggaataccagtaaactcaaagaatttatcctcttgtggacttgagctaccatatgtaagcagaagtgtgtgtggataacttttcatggtctcacaggaggaatcaagttcagcaaacagaatccccactctagagtctatccagttggcactataagggccaagactgtgttcccttgattgcttgctgaaaaatcaacaagcaaaagacatgttaataggagaaaaggcatataatttcatagaacttgtattcattaaagccttaggatgaagacccaaagatagagaaaattgtccatttttatgcttaggttcaacaaagtgtggatagcagtgtagaaatatgattggacgaaaagggtataatctaatgtttacatagagtggggaaacacaacaaggcctgtctgcctagattcttcttggcctctctaagcatgcatttctttcttctgggtatggggcagggaccctctttggaatgagggtcttatgatctacactcaaacaaggtaggtcggatgatttcttgatgaccagtttttacacagacagggcagagggaatgttagagtagtatttttaggtttcatgcatttgagaagaatgtttattctgttgttattgggtagaatgttctgtatatgtctgctaggtctgtttgatctataatgttgttcatgactgctgtttccttattgattttctgtctagatgttctatccattatggaatgtaatgtagggtattgaagtttcctactataattatattgctgtatattttctctcttgagtttggttaatgtttatatttaggtgctctgatgttggatgcatatatacttataattgtgatatcttcctggtaaattgacccttttattactatttaatgcccttatttgttgcttatgacagttttatactaaaagcatattttgtccgatgtaagtatagccacccctgttcttttttagctaccatttgcatggcctatcattttccgttccttcactttcaccctatgtgtgtccttaaatctaaagtgaatcttttatagttagcatacagttgtttcttttctttggtttcttttttaattcattcagccactttatgtcttttgattgagaagttcaatccacttaaatttaaagttattattgatagagcaagactaacttttgccattttgttcattgttttctgtcttaaagctcttttgtcccttttttatctcatgttattctccttcatattttattgatttttattatagtgatatactttgattcctttctcttttcttttgtgtgtcttctatagaaattttattgtggttaccatgggactcatgttcaacatcttataattataaaagtcctattttaagtagaaaacaatttaacctcaattgcatactaaaactctacacttctactttccttgacacttaatattattgacatcttgagttacatatttttatattatgcatccattaacgtatttttatagttactgttaatacttttttacttttataatacaattaaaagttaccaatatactgtcattaaagtattatagtatcctgtatttgtctacatatttacctttaccagacagttttatattttcatgtgattttgtgttgctctttagtgtcctctcttttcaacttgaagaacttcctttagcattacttgtaagaaaagtctaggggtgattaacttaggttttgtttgtctgagagtctttatttctctgtcatttataaaggacaaacttgctgagcatagctttcttggttggcaggtttcttctttccaacacttttaaaatatcatcctactttcttctggcctgcataatttctgctaagaaatgatagtcttatgaaggtttccttgtacatgacaagttgcttttctgtttctttcaaaattctgtctttgtctttgacttctggcaatttaagtataatatgtattggtgtggatttatttgggttcacataatttagggtctgtgggcttcctgaatctgagggtccattttctttcccagatttgggaagattttggttattattttctttgaatagtctttctggccttttctttcttttattctccttcagaactcccatagtgtatatattggtctgcttgttgatccctcataaaactttcttgactttttcttattctttttatggttttgctcttctaactataatttcaaacatcctatttttcaatttggtaattctttcttttgcttgatcgagtctgctgttagacctctgtagtgaatttctgttactctattcttcagttattgtgttcagttattgtcttgtactcttcaatatttatctctggttatttttatatttttatttctgttgaaactcatactttgttcatgcatttttcttctgaatttgttgagcatctttatgagttatttttaatagtctgttaagtaattcatatatctccattatattagggctggtttctggagctttatcttctgttgtttggggtatgttttcctgtttctttatttttcttgattttgtttgtttgttttggtatccatatattagaaaaaacagattcctttcccagccttcaggagaaggattagccttgtacaggagaagagtttcaccaatgaggcaggccagagattcttgggcctctcaaacatttcctgtgtatgcatcgtctctggacttgtgtgtgtaaattctcaataagagggatttttcagttgactttttctttttaagaattcataatctcttgttccctccagtgtccttctgtcataacatgtgtcttctgaggaagcagcatgtcctgagttcttttttttgtttccagtagtccccaggcatcaacagtatgctgggtcctgtccatgccctgagactggtcattcccttaggcagcctcctgagaagtctgaacacagggtatatatttcagtcttttatttcccatttcaggggcaagtcaagggctggaattcttgccaactgtgtcatgctgaactgggggaaggggctctggtgaatgagtacaaactaattcaaaacttcacctttgttctccatggccctgggccatttagaatatgctgggtcctattagtgctctaggagacaagtgggacagaagccagtccagtcattttttagaaaagttggagtgttagatgcactatccaactgtttttctccccagagaggtgcagatttggtgtttatcatctggttattctgtgctaaattgggggagtggctatttgagtgaggcatactattcaaacggctatctttgctctcattggttcctaaccagaggtcttttcctgtcagtgctcagattctggcaagacagaaaccagtcctttgggaacctccagaaaaatcagaatgttgaacacatggttcagttgttttctcccctccccagggagagactgggagatgatggttttctcccagttgtatggtattgtgttagcagagagggattatggtgtgagggtgtgtcagatttttctaccagctacctagctgattttgtgttcatctagggttcaggcacctttcaactagtttccgaatttctcacgaagggagcttatctccacattgtagttgaacttttatgtccatggagggaaggcgggtccagggcttcctattttgtcatcttgttgatgtcatcccagtagtttagttttaatacaaaaaatactaaaattcagagtaccaagtagctgcttgggtttgtgagttattagtgggtaaattgtttcttgcctcctgtcaagtttttgtcctttctttaattagtgactaatgtggctaataaaagcagggtaaatattcagaatgccatgatggggttcaaataacatacatttgccacaatattaaacaaacagaaactcgttcttgatttggatgacagaatatatatacagttttccaagcccagttagaaaagttattatgggccgggtgcgatacctcacacctgtaatcccagcactttgggaggccaaggcaggtgaatcacttgaggccaggagttcacgaccagcctggccaacatggtgaaaccccatctctactaaaaatacaaaaaattagctgggtatgatggcgcacacctgtattctcaactactcaggaggctgagacaagagaatcgtttgaactctggagctggaggttgcagtgagccgagactgtgctattgtactccagcttgggtgatagaacaaaattgtgtctcaaaaaaaaaaaaaaagtgaagttattctgttttttactctctgctacctgacatttagtaatatatgtaatatttagatcttatacctgaaatatcaataaaaaagttttaacaagtggtaattaaagataattttgaaaaaataaaatgatgactcacacgtatgtgaaaagaacatatttaactaataaaacaacttgtgagatgctataatcagttcaaaggaacgtccaaagaatagatacatttatagataataaatattgaaatgattgtacaaatgaaggcaaagttgtttttgaaagggggcttgtctctcctttggaaagagttcatttggatgtctacagataaaaagtgttttgtattgctatatatggttatgtataattttcaaagttgtcatatagttctcataaaatcagaatcagataacacagaaaggtatgctgcagataattcatagttttccattgaaatataattttttctctggggtagcctctatttaagagagtaatgataactgtaatatttaattttttacagtagtttatgctaaatgttagaagttaggagcaatagaaatgaaactggaatagtaatgttatgttataaactttgtgaaggaaattttatcttaattatcttaatttatcttaattatctctctattctttacctggaagcatcctaaaaagttatgaacacatgaggcattcattgttgttgatgatgaaacaaaataatgctgtcattattctcaattttacattaaatttatgttacctatttctattcataagaaataaatgatcaagcaaatgtgtatactacttttttttttaaagaaaagaacaaaaatattgaggaaaaaggagaaaaatatttagaatcaagaatgaagaaaatttaaattgagaggaacctcaagggttgaatgaatttctccaaaattattctagtttgtagcacctctttaacgttcctcttctttgttctaagatagaagtagtaataaatatgaagtggttaatcactcaacaattatgtaatggaatggtaatctctaaacttggacttatttgaatggtcttagaggtcatggtatgatattaaccaccaagctatttagttactcaagtaaatgaagaccagaacttcttcaaaaacttattaaaatttgggaatccacattcacctatttgagtcggtgaaccacaatggaaatggaaatctagatacatttatttaaatgatgggctatgaaatatgtattccatgatgcatcccatcacgatgtggagaattgctagactgtgctgtcagatgtgtaataatagttattaaaaactaagaataagcttggtagtgggaggaagcactttctgacattactcattgaatcaagtgctatgtttaggtgaagaggaagaggaggtggaagataagctacctcgaagagagagcttgagaccaaagaggaaacggaccagagatgttatcaatgaggatgacccagaacctgaaccagaggatgaagaaacaaggaaggcaagagaaaaagagaggaggaggaggctaaagagaggagcgtaagttagttctgatattctttcaaaagttccaatgctgaagaagatcactcctttcagatactctttgaccttaaaattggtaattaaagctacttttagaaagagagccttaatctgatgatgctattttattctacttaattaaatgtattttaatggttaaaatagaattttaaaatgaatatatattaaaaatggaccatgagaaattctcttatgaaggatctgaattatcataggtcgttgacatattacagttaatttaaagattttaaaatttccccactaattgtatgcattgttatctaggttaagtagaaactcctaaatagtgagcaaacatcactttatcttacagagcaggggttggaaaattatggctaaatccagcccaagaggtaagaatggtttttacagcttcaaagggtcattaataaaaagcaacaaatatgggacagagttgtacatctcactcaaagcttaaaatattaactatttggccctttatagaaagaaagtgtgctagcccttgttacagaggatttgggttgtcattttctttttaatacaactcaatatcttttagttccaccaggaaaacattttagtaaacgctgactttgtgtagaataatgcattaaatgctgtttaggaaaaatccaagaaaatacttttcttctttttgctttttggaaatttgcagatagcaggcaggtaggaaaaatgtacgtgtaaaacacctctaattaaagagaaaacctagaccccttggaaagaatgcaagagaacagccaacctgttccacaactcacaggtaatagggccatgcgagtcgccatcaggtggtggaatctcctccaaacactcctaggactttgaagcatgaggaactttctaagatgtcctcccaagatgacacacttctatactcaatagctctaactattgtgttattccttataaatgattgtcattaaaaacaactgaatgaaaaatttgtcaagtagagaagcttagcattaacaaaaaatggtttcttttagaataagaataacaccatctacttcatgtctaagttttcctcctcctcttccccagcttttcctttctcccttttgaataccaagacaaaacttgcttttaaattttgactctagtattttttatttatatctgcttttaaagtttctttatgctttattcctttcaaaaataaaatgcaacacattttatgtcccatgtattactatgattgttagttccattattatgtagtaatagttcctatttagcaaagcttatgctttccaacagtggtatttcattgagaaaacatctccaattgatgtatgcatgatataggttgtgttccaaaatttgcttttcctctctatttatgccgcaaaaaaatccttttaaaaagatgagttggacaggaattcctctgctctcttcgtctgctgatggccctcatggcaactgctcaacttctaggaaatggggccatgtgaagcaactggatcctgtggctatgacagtgtctcttcctagctggcctcactttcattttgatcttgagaatcaagatcccttacctcccactcttccacataacccaactctctccataggttttgcaaattgtatttttgctgcgacaatttgtgcatctattataaatagtatcagaaattagttgtgattattgatagttctgttctctattttagagtctattttctattgttcattttgaagataaacatcttttttttaaaagaaaatcttagataatatttttgagaaagattagtagccaaatcagggcacatttatgtaggttaattaattcagggtattttttatttaactattcaagtaatgcctcagggaatttcccttgcattgacacaacatttgaaaccaactaaaaccaaggttgtaatgctaactatctttggaggcagttaaaaaaacactgccttgttagacattttggagtatttccagtaatattacaggcttttcctgacccagttttaagtggataagtaatatattcatagcagtgagaaattcagcatattatgccttcttcttcctaacaactgttgtttaaatatatcaaacttaagatagaaaaccattcttgcacagattagcctgaaaatttagatgaggcatgcctatgccttttaatatgattagccctttctttgagtgattctagaaaagcaggtttcctgtaatgctgattagaaaagtattttaattaccttcatatttgagggtaacttatgtgtcaacaactgtaccctgtaacacagcctgatcctcctggtgaaataaacaattaacaacagagacttaaaagatataccaatctggggtcatttagtacaggaataaacgtctttccataccataataatctcagaggtagttgttatattttagtgtactttgagcactgggtttatgatgataaccctgagcaatccagaaaagttttgtatacatatgttcattcaataagttatttacccagctctacttttgtgcaacctaatttgcttatatctttgggatacttggatatgaacatgtaattgcccacaatcttgcaatcttcaaaagtccataatatagtaagggataggccacttagatacaaattattatgacataagaaagtatatgtgtcccagagaaatacaaacaaagtagcttggagtctcagagaagtgaaaactgttctcacagggatagttagaaaagggattcttaaagacatttcatatgatttttaaaggacttgaaatttggacaagctgaacttataaactatttaattagtattagaattgtttctattaaagggtctctgaaagttggcctgtaggtttagttacctggcaaatccacacatcaaatagataattctttcattctttggtgatgttggattagagatgctgttttacatgtgattcttaatggaagttcagtagtgtaaagctttaaggtaattatatgtaaatatcatgaattattttgaaatggttggcaagttaaaggcttaacatatcaagcaattaaattattaatcataaagattttttctaattgactttattactgataatttcttgccatctgttttattttatttttgctagtttctgaaaatatttcaataaaactgctatctatgtaatttaaagttattcctatgtttgcatggaaacaattgtgatcattttaattaaaacacatctttacctcctaagacaaactaacccacatatcattctaattggcaaattaaaaaaaaaaattgtggatatagatagagtaaaaaaaatcctgaaatattttatgccatggctacacagcatcataggcttttatatgataaacaccaaataatgaaaatagaaacaacccaatggctatcagagatgtatcttagaagagtgtacttccctggttctcttgaaccaaaatgattattctaagcaaaatgtttgaattgtccaaaaaacaaactgtcaataggaagtgttattttaaagggttaatatgaatttttgtttcagtaatcatagcatgattaaaaactataaattggtggcaaataaaggagattgaaagtcattttgtaaggtgaactataaaactgtggatatgtccttttcctcaactagaactttaaaaagcagcttttgccttatttctactgtatctagtcataaattatttttctgagtaatactgaattggattacaatttttgttattggtcaatatctagtgaggggagaaacttcaacagttaattgaacagagagaatttaataagtgaattgttaggaggtataaatgttaattagactgcagaaaaggtaaaaagagaacactaaagtatcatagtgacggtaactactggaagcagctaccatcccaagggctggaggaacaatggaaagggttgaaacgaaaacactgtagcgtagaggaaagaccctaggagctaaaactcaggcctctgcagaggggctgatgctctgtggtgctggtttctgtgggagaggtgatgaagctggttctgctagtgttggtaatattggtgataaggattcacttgcagtatggcaaggacgctcagctccaggagtgaagaagagatgctaaggaggaagtgtcaccccacaaagcaaatatgaagcagagaggaagccacaggaaagacggagaccctcttcagtatcccctattgtcagagtatatattgacccagctaacaaagcagaaatatgactcacaaaataccagccccagcaccacaatattaaagtgtaggagggtgtgtttgaagttgggacaatagcttaaaaactgaaataatctattaccaaaaagctgatctctacaatgtggtattgcatgcctcgatttaaaattatgttgctcttgtttagattttgtttcctttgagttctggaccgcatagtgttttcgtaatactaggaacacagaaaagaaaagctacatctcatgctcagtaggaactaaattcctttgaagatctcttcaaaggattcacttccaccaaatatatttcaaggtgaattttaccaaatgaagttataagtttaattaacagataacattaagttacctttgagaaatagatttttatttttcccgatttcaatttttctttctttctttctcttgagacagggctaacaaaatttttaagggcaaagacatcttcacccctaatttattatccttattgagaaataaaatatttaaacgaaatgtagaattgagggaaggtattcaagggaacaaagaagagagggaaatatcttgatatatctgtaattattctttccacagattttctggttcagagagtttgaggctctagacataaaagaattgcttagggcgggtgcggtggctcacacctgtaatcccagcacattgggaggccggggagggtggatcacctgaggtcagaagttcaagaccagcctggccaacgtggtgaaactctgtctctaataaaaatacaaaaattagccgggcaagatggcagatgcctgtaatcccagctactggggagcctgaggcaggagaattgcttgaacctgagaggtggaggttgcagtgagccgagattgtcccactgcactccagcctgggcaacagaacgagactctgtctcaaaaaaaaaaaaaaaaaaaaaaaagcccggcttatgcctgtaatcccagcactttgggaggccgaggtgggcagatcacctgaggtcaggagttcgagaccagcctggccaagatggtgaaacccccatctctattaaaaatataaaaattagctgggctaggtggtgggcgcctgtaatcccagctactcgggaggctgaggtagattgcttgaacctgggaggcagaggttgcagtgagccaagatcgcaccattgcactacagcctgggtgacaagagcaaaactccatctcaaaaaaaaaaaaagaaaagaaaagaaaaaaacagaatggcttagattcagattcaggaaggcaaacactactgcttaaagttataatagttccagtaatcctgcatcagtgttcagatttgagttctcatgcttatgggtcctaatgttgactgcatatggttacatttaaaaaaaatgagctaaatatctgatacctgccttccttaagttccaaagtcaagcaaagcttaactttattaaggtgtttcttttttacttttaaagagaagaagaagaaattgatgaagaggaattggaaagattgaaggcagagttagatgagaaaagacaaataattgctactgtcaaatgcaaaccatggaagatggagaagaaaattgaagttctcaagtatggtgccactttttataagtagaaacactttccctgatattgattttctaaatcctctgaatattccatatatatatatatatatatatatatatatacacacacacacacacatacacacacacacacacacatacactgtatatatagtatatgtaatactatatatatcatttatatatgactcattatatataatggtcacagtcataaacatgtatatcatatttctgcatatatacccaaatatatgtatatttacatatatctgtttcttatcactagagagactgggctaatgattataaattggaagcaactctgagaaattatttagagtcttttaaattctttggtcatctttaatcatttgttccttaaactggagtttccttagcttaatacatttgttaccatctctttgaaagagataatatatttgaattttacaagtttgtgtggattgtgcactcttgtttctcttcagggccctggtctcaaatgaacttttcatgtgacagcttacattaaagcacagagaagatgctaggccaacagaatagtaaataggattccaattaaaggttatgctaatagctattccccgaacatgtcagtgacccaatttcagtcttatgttgatgctaatgtggacgcgaacgcagtcagagcacacagatttataaactcttcatatgaaaagtcaaatgattatcctattctgggggatgggaagattcacccctgaggatcacactatatttccctgccctggtggttgggagaggaggaaagggcagggaaaagggaaactgtttgtgataacagccatgtttgcatctcctagttttgccaaagattgcattcttccataaatcatttttataaatagtagtaagttttaaaaactatcccttcacaagcctatttaactagtaatgctgtaaaaatgatagtatagtattattgtctctgatgatgaaaacaagaactgaaatagctatcaggataattcacttctagtcttggttctgcaagagcttgtgtgctatttaaaggtatcgcttaatctcctgaagccttagttacctcatatccaaaataaagaaagatattctatatcttctctgtgcgcttgaagcgtagccatcatttatagtatttttgttttgttttgtagagtaaggttttccaagttctaaacaatggttttcccagaaaacttttgcaacaccacaaaattgcagtctgggaactccctttgcatgctcatgtacacatccatcataaatgaaggcaaaggcaagcagcatcctacgttccacagagctacaaattttgtgtatgcatgctcatgtgtctgtacattaaaataattttcatttagcgaagtgataatgatgctaaattataggttttaaaaatattcttacctggcaaaatagaagtttggcaaccctatgtgggcctctcaaatatatttgaaatattaatgacccataaagtccccaaacttgggaacttcagataactatatatagaaagtttaaaattggagcaatattgtgaacttccaaaatatatgattgaataaaaattccaaggactacctttcctttccaactgcatggaggtgtagaaatacccccctggtctttgcccgtatctctcgtgcaggatcgtggaggagacagcagcttcagatttgagttaggatctcagatcttccatttaatagctgtgcacatttgatcgagttgtgtagtctctctacacaactcaggttccttatgaaattgtaccttattgacagagtttttggaattataaaatgagataatttatgtaaaacatgttgccagaacttggcacatagctgggaaacctaagttgtagttattacttcatctcagaacagacttgatgcccaattcctgaagggtgacaagagagatggagagaatttgggacctggcaagtctaggtgggagcagacctagtcacaatcagaccccagaagccttgtgggatggtgacacattggtaccagtttggataaacaataagattttgaggatgcaacagaaggaagtaaggcatttgacaatttagcaaaatccaggaccagaccgttctcagatcttctaaaacatagccatagttctgtggcagatttcaaggtctcaggccttggtctggagtccaagagttaagcaaattttagcaatggggagagataggcattagcattggaaagaaggacaatacgagcccttagtacgaaagcagacactgacaataaggagaccgcacctgactctaatctagacataggtttttttatttggcccacatgtgttttgtttctttttcttttattttttttaaccgtggcaatatatacaatacaaaattcaccattttaaccatgaaatcgattttctttatcataatttttttcaatatttttaaaaatttaaattactttttttttctcgagacagggtcttaactctgttgcccatgctggagtgcagtggtgctatcttagctcactgcagcctcaatctcctgggagcaagggatccttctgcctcagtctaccacgtacctgggactatatgtgcacactaccatgtttggctaattttttctttttgtgtagggatggggtcttactatgtcgcccaggctgatctcgaactcctggcctcaagccatcttcctacctcagcctcccaaagtgctgagattataggcatgagccactgcacccagcctcaatcttttaaaagtgggagtaaaatattcagatgttcagcttttcatgaacaagtggaagatttggtcctacattcttccatcacagtaacagctaggactaagcacctggcctctattaatggggcattcctttttcaatttgcaccattctcaaacaatccatattacttgtttatgctgcttggctggaccctgtagacattcagatttgctgcctcctaccagtgcagctggggaacaagctaggcatgttaccaagacggtgattcagatcttcaaagccaaagtcagctcacagaatggaagcacaaatttagtcccagaaaagaaacaactgtggcttctcacatgtcagcaaggctcacagtctggtgatgattttccatggccagaagtggtttctgccttgtggccgcacctatgggttccagctggtgccatggccggggccagcctaattcttttggtttcagtctccgtgatgaagttgttggtacttaagtgcctgacttatctctctttgaatgctctattgagctttttttgaatgttctattgagcttctccccaccagattccaactacattattagaacaagtggtcagtacttcacagaacgtgcaggtaaatgtttctctaccccaatgccaccaatgcttgggagtgaggcagctttccctctaccctttatttctttcagagacatctaactttgagagcgtgtttctaaggattatgttattaatattccccaaattagcctgcatcatcgctcctggctaagtctgtgaaacccaagatactaagctcagtgtaactgaaagagatgttttgatcacagctttgaatctgtgcctgggttcgaagccttcttgttctggacttggagaaagttttgaaacttctaaaagatattttagacagtgtcagggttttaagatatattttagagtaagcctcaggaatggcaacttatggttctgagggtgttatgggagactcagagatagttcccacatttttaaagagcatctaccattaggaacccgagcacactcagggcttaggatcaaaagatggttaatataagtggttgctacataggcaggcagctctaggaattggttgtgaatccatattaatcctcaaacatggctcaggagctagagttcagcattttcaagatagcagaattggctctatacagctgaaaggaagccatctccttttcatcatcactgtggaaattgtgattttcattctatgttttattgtatatcaatacaatttcacacattcctgtagccttaaacctactgaatgataatctcttggtggaaaggcaggtgtgtctggcccagaccagaaatgtatatttttattttttgatctaaaaattactgatatatagtcagaatgaaagctgctgttttcaattctgagagacagaaagctccactaaacagaatactcagctctacagatgatttatacaatgaggaagagtgtgtgtagggagttggaggggggtaagggaaacagtgtcatattttccaattatttgaaagtcaatttctatattttattaatcacatcatttaaaaatatccattaatgagaatactaagtataatctgtttttaagctgttcatgggtttaattcagaggctgtatgactagatctttcctacctataagaggtcgcagcacttacctgatagcagccaccacaagtgaaataaaatacccaggtagaaagtaacaggtctacttattacttgtcttgaaacctaagacttttaactgtatcagaacattatatgtggtagattgaaagtgctcatgactaaacctaaataagcaaccaccttattttgttacagtagaataggttttagactgaaaattgagacttggactttgagctaagtgcttcctataacttctctttgaacctccatttattcatttataaaacagataaattggattgtggaccatggtcttcaaactgctatcctccaaagtcaagcagtttggtgaaatcaaatcagggcaaaggaggcagaggtcgcagggagagctactgggccacaatgccggcttcaaaaacagacctatggtttctctcttctacacagtgtacttccatataaagcattgattggaagaaagaatgcttctgtggctattaaaataaaaaacagttttaaaaacccacttagctggatatttaaagaaacttattttggagaagggacagttctaacatttcatgagtctacaaattaggatacagaaacactccaagtatacttttgcagggaattggcttttggatagacaccattttaaaatgatttattttgataacaaaaatgtttatttagctattatactgactactttaatttctgagctttgtagtaccctgacctattgtttctgggagttgtccattggctggctaggcctggtgatttattaatgagacacccagtaaagccaggaaagttatcctcagatttcattcacacttaaacaggtgcttcaaactgtcagctggccattaaggtaacattcctccttactcaatctcccttgatcttttcacacttcttttcatttgtttgtttgttttttattttgttttattttttagttgggagaatgaatacatttttaggaaagtgaaaacagaccatggttgatttcctctaatggagctgttgggaaaactttgggaaaactatttatttggcttccattctcaccctttctctcctgttttcttgtagcttaagattttcacaggcaagaatcatggtttatactttagtttttctctcatctgtcattgtgaaggaataaaagatgctatacaagaggacatttaagcgtgtgaacacacccaccaacataccctcaaaccattctggattattttcttttttaaattttatatttccataagtttttggggaacaggtggtatttggttaaatgagtaagttcttggggaacaggtggtatttggttacatgagtaagttcttctgtgatgatttattagattttggtgcacccatcacctgagcagtatacactgaacccaatttgtagtcttttatccctcatcccaatcccaccctttccccagagtccccaaagaccactgtatcattcttatgcatttccgtcctcatagcttagcttccacttacgaatgagaacatatgatatttggttttccattcctgaattacttcacttagaataatagtctccagttgtatccaggttgctgtgaatgccaatatttctttctttttctttttctttctttcttttttttttttttgagatgggatcttgctctgtcacccaggctgtagtgcagtggcgtgatctcggctcactgcaacctttacctgccaggttcaagcgattttcctgcctcagcctcctgagtagctgggattacaggcatgtgccacaacacccagctaatttttgtatttttagtagagatggggttttgccatgttggccaggctggtcttgaactcctgacttcgggtgatctgcccaccttggcctcccaaagtgctgggattacaggcgtaagccaccatgccaggcccaaatgccaatatttcactcctttttatggctgagtagtattccatcatgtatatataccacaatttctttatccattcattgactgatggacatttggtctggattcatatttctgcaattgtgaattctgctgctataaacatgcatgtgtaagtatcctttttgtttaatgacttcttttcctctgggtagataccctgtagtgggattgctgggtcaaatggtagttctacttttagttctttaaggaatctccaccctgttttccatattggttgtactagtttacattcccaccagcagtgtagaagtgttcccttttcaccacatccatgccaacatctattattttttgatgttttgattatggccattcttgcaggtgtaaggtggtattacattgtggttttgatttccattttcctgatcattagtgatgttgagcattttttcataagttttttggtcgtttgtatatcttcttttgaaaattgtctattcatgaccttagcccactttttgataggactgtttgtatttttcttgctaatttgtttgagttctttgtagattctggatattagtctttgtcagatgtagagattgtgaagaccttctccctctctgtgggttgtctgtttactctgctgactgttccctttgctgtgcagaagctctttagtttaattaagtcccacttatttatctttgtttttgttgcatttgctttggggttcttggtcatgaagtctttgcctaagccaatgtctagaaggttttttctgatgttatcttccagaatttttatagtttcaagtcttagatttaagtccttgatccattttgagttgatttttgtataaggtgagagatgaagatccagttttattctcctgcatgtggctagccaattatcccagcaacatttgttgaatgaatagggtgtcttttccccacattatgtttttgtttgctttgtcaaagatcagttggctgtaagtatttggatttatttctgggttctctattctattccattggtctatgtgcctatttttataccagtagcctgctgttttggtgaccatagccttatagtatagtttgaaggaaggtaattggatgcttccagatttgttctttttgcttagtcttgatttggctatgtggcctcttttttggctccatatgaattttagaattttttttctagttctatgaagaatgatggtggtattttgatgagaattgcattgaatttgtagattactttaggtagtatggtcattttcacaatagtgattctacccaaccacattagcatggatgtatttccatttgtttgtgtcatctgtgatttatttcagccatgttttgtagttttccttgtagaagtatttcacctccttggttaggtataatcccaagtacttttttttttttcctgtggctattgtaaaaggggttgaatagttgatttgattctcagcttggtcactgttggtaaacagcagagctactgatttgtgtacattaattttgtatcctgaaactttgctgaattcatttattagttccaggagctttttggaggagtcttcagggttttctgggtatatgatcacatcatcagcaaacagtgacagtttcacctctttaccaatctggatgccctttatttctttctcgtgtctgattggtctggctagtactatgttgaatagtagtgagagtgggcatcctcgtcttgttccagttctcagagggaatgctttcaactattccctgttcagtattatgttggctgtatgtttgtcatagatggcttttattacattgaggtacgtcccttgtatgccgattttgctgagggttttaatcaaaatgggatgctggtttttgtcaaatgctttttctgtgtctatttttttttcgggggggtgggtgtttaagagcagaaagtttaataggcaaaagaaagaagagaaaaccacccccatgcagagggagggggatcctctcttgctgcatctattgagatgatcatgtcatttctgttttaattctgtttatgtgttgtgtcacatttatttacaagtgtatgtcaaactatccctgcatccatggtatgaaattcacttgatcatagtggattatctttttgatatggtgttggatttggttagctagtattttgttaaggatttttgcatctatgttcatcagggatattggtctgtggttttctttttttgttttgttctttcctggttttggtattagggtgatactggtttcatagaatgatttagggagtactccctctttctctttcttgtggaatagtgtcaataggattgaatgtctgatagaattcagctgtgaatctgtctggtcctggacttttttttgttggtaatttttaaattactatttcaatttcattgcttgttattggtctgttcagggtttctaattctgattctagctaaatcctcctgatttaagctaggaggattgtatctttgcaggaatttattcatctcttctaggttttctagtttatgtgcataaaggtgttcatagtagccttgagtgatcttttgtatttctgtggtgttggctgtaatatctcctatttcatgtctaatagagcttatttggatcttctctcttctttgcttcattaatcttgctaatcgtctatcaattttatttatcttttcgaagaaccagctttttgttcaatttatcttttgtatttttgttgttgtttcaatttcatttagttctgctctgatctttgttatttcttttcttctactatttgggtttggtttgtttttctagttccttgaggtgttaccttaggttgtctatttgtgctctttcagactttttggtgtaggcatttaatgctatgaacttttagcaccacctttgatgtatcccagcagttttgataggttgtgtcactattattgttcagttcaaagaattttttcatttccatcttgatttcattgttgacccaacaatcattcaggagcatgtactttaatttccatgtatttgcatggattggaggatttcttttgatttccaattttattccactgtggtctaagagagtacttgatacaatttcagttttcttaaatttattgaaacttgttttctggcctgtcatatggtttatcttggagaaagttccatgcactgatgaatggaatgtatactctgtggttgttgggtagaatattctgtaaatatctgttgggtccatttgttctaggtatagttttaatccattgtttctttgttgactttctgtcttgatgacctgtctagtgctgtcagtggagtattgaagtcccccactattattgtgttgctgtctatctcatttctgaggtctagtagtaattgttttataaatttgggagctccagtgttaggtgcatatttatttaggattatgttttcctgttgaacaaagccttttatcatgatttagtgtccctctttgtattttttaactgctgttgctttaaagtttgttttgtctgatataagaatagctactcctggtcacttttggtgtccatttgcatggaatgtaattttccacccttttacctcaactttatgtgagtccttatgtgttagttgagtctcttgaagacagcagatacttagttggtgaatactttttttttaaattatactttacattctggggtacatgtgtggaatgtgcaggtttgttacataggtatacacatgccatggtggtttgctgcacctgtcaacccgtcatccacattgggtatttctcctaatgctgtccctcccttagctccgcatccccaaacaggccacagtgtgtgtacatgtgttctcattgttcaactcccacttatgagtgagaacatgtggtgtttagttttctgttcttgtgttagtttgctgagaatgatggttttcagcttcatccgtgtccctgcaaaagacattaactcatccttttttatggctgcatagtattccatggtgtatatgtgccacattttctttatctagtctatcattgatgggcatttgggttggttccaagtctttgctattatgaatagtgctgcagtaaacatacgtgtgcatgtgtctttacagtaaaatgatttataatcctttgggtatatacccagtaatgggatggctgggtcaaatggtatttctagtttcagatccttgaggaattgccacactgtcttccacaatggttgaactgctttagactcccaccaacagtgtaaaagcattcctatttctccacatcctctccagcacctgttgtttcctgactttttaatgatcaccattctaactggcgtgagatggtatctcattgtggttttgatttgcatttctctaataaccagtgatgatgagcctttttttcatatgttggttggctgaataaatgtcttcttttgagaaatgtctgttcatgtcctttgcccactttttgatggggttgtttgatatttcttgtaaatttgtttaagttctttgtagattctggatattagccctttgtcagatggatagattgcaaatattttctcccattctgtagattgcctgtccaatctgataatagtttcttttcctgtgcagaagctcttcagtgtaattagatcccatttgtaaattttggcttttgttgccattgcttttggtgttttagtcatgaagtctttgcccatgcctatgtcctgaatggtattgcctaggttttcttctagggtttttacggttttaggttttaggtttaagtctttaatacatcttgagttaatttttgtataaggtgtaaggaaggaatccagtttcagctttctgcatatggctagccagttttcccaacaccatttattgaatagggaatcctttccccattgtttgtttttgtcaggtttgtcaaagatcagatggttgtagatgtatggcgttatttctgaggcctctgttctgttccattggcctatatatctgttttggtaccagtaccatgctgtttttgctactgtagccttgtagtataagtttgaatcaggtagtgtgatgcctccagctttgttctttatgcttaggattgtcttggctatgcaggatattttttggttccatatgaaatgtaaagtagtttttttcaagtctgtgaagaaagtcaatggtagtttgatggggatagcattgaacctacaaattactttgggcagtatagccattttcacgatattgattcttcctatccatgaacatggaatgtttttccatgtttgtgtcctctcttatttccttgagcagtggtttgtagttctccttgaagaggtccttcacatcccttgtaagttagattcctaggtattttattcactttgtagcaattgtgaatgggagttcactcatgatttggctctctgtttatctgtttttgatgtataggaatacttgtgatttttgtacattgattttgtatcctgagactttgttgaagttgctaatcagcttaaggagattttgggctgagacaatggggttttctaaatatataatcatgtcatctgcaaacagagacaatgtgacttcctcttttcctaactgaataccctttattcctttctcttgcctgattgccctggccagaacttccaatactatgttgaataggagtggtgagagaagacatccttgtcttatgctggttttcaaagggaatgcttatgcttccagtttttgcccattcagtatgatattggctgtggatttgtcataaatagctcttattattttgagatacattccttcaatacctagtttattgagagtttttagcatgaagggctgttgaattttgttgaaggccttttctgcatctattgagataatcatgtggtttttgtgattggttctgtttatgtgatggattacatttattgattcgcatatgttgaaccagccttgcatccccaggatgaagccagcttgatcatgttggataagctttttgatatgctactggattcagtttgccagtattttattgaagatctttgcattgatgttcatcagggatattggcctgaaattttctttttttgttgtgtctctgccaggttttgctattaggatgatgctggcctcataaaataagttaaggaggattccctctttttatattgtttggaatagtttcagaaggaatgataccagatccttttagtacttctggtggaattcatctgtgaatttgtctggtcctggactttttggttggtaggctattaattgctgcctcaatttcagaacttgttattggtctagtcagggattcaacttcttcctggttcagttttaggagggtgtatgtggctagaaacttatccatttcttctagattttctagtttatttgcatagaggtatttatagtattctctgatggtagtttgtatttctgtgggatcggcggtgatataccctttatcattttttattgcatctacttgatttttctctcttttcttctttattagtctggctagttgttgatctttcaaaaaagccagctcctggattcattgattttttttttttttgaagggctttttgtatctctgtctccttcagttctgctctgctcttagttacttcttgccttctgttagcttttaaatttttttgctcttgcttctctagttcttttaattgtgattttagggtgtcgattttagatctttctttctttctcttgtgggcttttagtgctataaatttccctcaacatactgctttcaatgtgtcccagagattctggtacattgtttctttgttctcattggcttcaaagaacatctttatttgtgccttaatttcattatttacccagtagtcatttaggaacaggttgttcagtttcgatgtagttgtgaagttttgagtgagtttcttaatcctgagttctaatttgattgcactgtggtctgagagactgttatgatttccattcttttgcatttgctgaggagtgttttacttccaattacgtggtcaattttagaataagtgcgatgtggtgctgagaagagtgtatattctgtttatttcgggtggagagttctttagatatccattaggtctgcttggcccagagctaagtttaagtcctggatatccttgttaattttctgtctcgttgatctgtctaatattgacagtggggtgttaaagtctcatgctattattgtgtgagggtctaagcctctttgtaggtctctaaggacttgctttatgaatctgggtgctcctgtattgggtgcatatatatttaggatagttagctcttcttgttgcattgatccctttaccattatgtaatgctcttctttgtctttttttgatgtttgttggtttaaagtctgttttgtcggagactaggattggaacctctgcttttttttgctgtccatttgcttggtaaatattcctccatccctttattttgagcctatgtgtgtctttgcacgtcagatgggtctcctgaatacagcacaccaatgggtcttgactcttaatccaatttgccagtctgtgtcttttaattggggcatttggcccatttacatttaaggttaatattgttatgtgtgatttgatcctgccattatgatgctggatggttattttgctcattagttgatgcgatttcttcatagcgttgatggtctttacaatttagtatgtttttgcagcggctggtactagttgttcctttccatgtttagtgcttccttcatgagctcttgtaaggcaggcctggtggtgacaaaatctctcagcatttccttgtctgtaaaggattttatttctccttcacttatgaagcttagtttggctggatatgaaattctgggttgaaaattattttctttaagaatgttgaatattggcactgtcttctggcttgtagggtttctgcagagagatctactgttagtctgatgggcttccctttgtgggtaacccaacctttctctctggctgcccttaatattttttctttcatttcaaccttggtaaatctgatgattacatgtattggggttgctcttcttgagcagtatctttgtggtgttctctgtatttcctgaatttgaatgttggcttgccttgctagcttggggaagttctcctggataatatcctgaagaatgttttccaacttggttccattctccccatcactttcaggtacaccaatcaaacatagatttggtcttttcacatgatcccatatttcctggaggttttgttcatttcttttcactgttttttatctaatcttgtcttcttgctttatatcattgaattgatctccaatctctgatagcctttcttctgcttgatcgattcggctattcatactcgtgtatgtttcatgaagttctcgtgctgtgtttttcagctccatcaggtcatttatgtcctctaaactggttatttcagttagcaatttgtctaaccttttttcaaggttcttagcttcttttcattgggttagaacatggtcctttagctcggaggagtttgttattacccaccttctaaagcctacttctgtcaattcgtcaaactcattctccatccagttttgttcgcttgctggcaaggagttgtgatcctttggaggagaagaggcattctggtttttggaatgttcagccttttcgcactggtttctccccatcttcgtggatttatctacctttggtctttgaagttggtgaccttcggctggggtctctgagtggtcctttttgttgatgttgatactattcctttctgtttgttagttttccttctaaccatcaggcccctctgctgcaggtctgctggagtttgctggaggtccactccagaccctgttcacttgggtatcaccggcagaggctgcagaacagcaaagattgctacctgttccttcctctgaaagctttgtcccagagggacatccaccagataccagccagagctctcctgtatgaggtgtctgtcagcccctactgggaggtgtttcccagtcagtatacctgggggtgagggactcacttgaggagtcactgtgtcccttatcagagctggaacccagtgttgggaaatctgctgctctcttcagagctgccacacagggctgtttaagtctgctgaggttgcacccacaaactccccttcccccaggtgctctgtcccaggaaggtgggggttttacctatgagtccctgactggggctgctggctttttttcagagatgccctggccacagaggagggaatctagagaggcagtttgggtgcagtgtccttactgagctgtggtgagcttcgtccagtttgaacttcctggcaactttgtgtacactgtgagggtaaaaccccctactcaagcctcagcaatggcagacgtccctccccccaccaagctcgagcatgccagatcgagctcagattgctgtgctggcagcgagaatttcaagccagtggatcttagcttgctgggctccgtgggagtgggacccactgagccagaccacttggctccctggcttcagccccctttccaggggcgtgaatggttctgtctcactgacattccaggcaccactggggtatgaaaaaacaactcctgcggctagctctgtgtctgcccaaacggcagcccagttttgtgttggaaacccagcaccagggccctggtggcgtgggaactggagggaatctcctggtctgcaggttgtgaagaccatgggaaaagtgcagtatctgggccggtgtatgtggtacagtccatagtggcttcccttggctaggagagggagttccctgatcccttgcacttcctgggtgaggcaacgccccaccctactttggcttgccctccttgggctgcatccactgtccaaccagtcccaatgaaatgaactgggtacctcagttggaaatgcagaaatcacccaccttctgcatcgatcttgctgagagctgcagactggagctgttcttgttttgccatcttgccagcaaatcggtgaattgttatgtattctgcaattctatatcttttaagtggagcatttaggccatctgcattcaatgttagtattgagatgtgaggtactattctattcatcatactatctgttgcctgaataccttggttttttatttatttacttatttattgtatttttgttttaatgggtcttgtgagactcatgatttagagattctgttttgatgtgtttccatggttcgtttcaatatttagagctcctttcagcagttcttatagtgctggcttggtagtggcaaattctcttggcctttgtctgaaaaagactgtatctttccttcatttatgaagcttaggatacaaaactgttggctgataattgttttgtttaaggaggataaaaataggaccccagtcccctctagcctgtagggtttctgctgagaaatctgctgttactctgatagattttcctttataggctacctggtgcttttgcctcacagctcttaagatttttccctctgtcttgactttagataacctgataactataggtttaggcaatgatctttttgcaatgaatttcccaggtgttcgttgaacttcttgtatttggatgtctacatctccagcaaggctgaggaagttttcctctattattcccccaaatatgttttccaaacttagatttctcttcttccttagggactccacttattcttaggtttggtcatttaacataatcccaaacttcttggaggctttattcattttttaaaattcttttactttccagtacattttgcatttctctgtgttctttacttcctgaagtagtgattgttttatatttatgctatctatttcactgaagatttctcccctcatatcttgtatcatatttttttatttccttaagttggacttcacctttttctggtgcctccttgattagcttactactcgaccttctgaatttttttttctggcaattcagggatttcatattggtttggatccattgctggtgagctattgtgattttttgatgatgttaaagaacattattttgtcatattaccagaactgtgtttctggctccttcttatttgggtaggctatttcagaggaaagatctgaagctcaaggctgctgttcagattcttttgtcccatggggtgttcccttgatgtagtactctcccccttttcttaggaatgtggcttcctgagagccaaactgtagtgattgttatttgtcttttggatctagccacccagtggagctactggtctctgggctggcactgggggatgtctgcacagagtcctgtgatgtgaaccatctttaggtctctcagctgtggataccagcatctggtccagtggaggtggcagaggagtaaaacagactctgtgaggtgccttagttgtagttgtttaatgcactagttttgtgctagttggcctcctgccaggaggtggcgctttcaagagtacgtcagctgtggtagtataggggaggatcaggtggtgggtgggggccctagaactcccaagaaaatatgaactttgtctttagctaccagggtgggtagggaaggaccatcaggtgggagcagggttaggtacgaatgacctcagactctccttgtgtggggcttgctgtggctgctgtggggataggggtgtggttctcaggtcaatggagttatgttcccaggaggattatggctgcctctgctgtgtcatgcaggttgtcaggaaagtggagaaagctgatagcctcacccagctcccatgcaacccaaaaggctggtctcattcccactgtgccccctccaacagcactgagattgttttcaggcagtgggcaagtagggctgagaacttgccccaggttaccagcctcctggttgagaaagcaagcggggcttttgtgccacctccctgcctgtcaccggattcacatcctcccccaagttctggccaggaaacttcacatttggttggaatcgttacagagttcagctggaggtttccttctccctgtggtcttttcccagttcctctggcagccctcctcaaggactcctgtgagacaagtcagaaattgcttctctggggacccggagaacccacatggcttttcctgtggcttcttctacccttgtgtttcactcagctctctaaattgtctcagctccaggtaaggtcaaatctttctcttgtgatctggacctttaggttccccagtgagtgtgtatattcggggcaggggatgatctccctttcccacttttgcagtttgggcactcacagtatttgggctgtctcccaagtcctgcaggagcaacctgtttccttcaaatggtctgtggattctcttgactttcccagtatatttctgcagcagttcttggaacaaaagttcacaatgcaagtctccacattctattctatccatccaagtgggggctgcaatttagtcctgactcctatctgccattttttcctagcagttcattctggattatttttaaccaataactcaaccaaagcacaggccttcagttcttgtactttacaggtatcttgagtatagcaatttttcatctgcagaatggagagtatataggcaattaatgcatctagattttgtccatcaaaaggtaacattgacatcccatttttctgctattttataagttcataccaggtgtcaagcattatgctgtgggcaagtttcttagtctctacatccttgagtctccttactatgaatggagataaaagtactactgcataaagttattgagataattaaataagctcatagatacaagcatgtaacatggtacctagcataataattttctttatccctcttaaccctccttcaaggtaggttttactattttgactttacatataaggaaactgaaactctgagaggataaataattgtcagacaattaataagtgatagatccacaatttaagcttgttgtgtggaaacttaccttggtatgatggaggtctctaagtacactaccaagcaagctctcccagaagtcacaaacctgaagttcacataccaaattaaaatgctcaaatcacatggcttagtaagcttatttaaagcacagtgagaagtaaggggaaagagatgggttatggtaagacatgggataaagtagcaatatcgtgagatcatgggcaacaggaccacacttctgtatcctgtgttctgcagtgttcgtgtgccctgtctctctcatcctgctgatagtgtggctaaggggactgaggtcccaatgggggccacataataaagattacttgggccaatgataggtacaagctccattggaatgaatgacacaggacaagtacgcctgatcatagcagtagcttgtgattagcctgctgaaattgcaggagttgtgtctgcatttcttggacagagcagatgcaagaggaacaaactggatgacaccaatggctggtcaagttagcagtgacaggtatctcagtcccaaagtgtcaggataatgatttggtcttttcatctctttctaactgtaatgttcttgtttgttcatcatatatatttttaaaaatttattttctgtctttctttggcagatattacaggttactaatttacctgctatctgtagtgaacacatcaaacatgcctatgcatcatatgtacatgtttacttattagctatatttaacatatcctatgtgcaggaccagctacataatttgcatgatgtaatgtaaaatgcaaatggggggccccttgttaaaaaatacttaagaatttctattattaagaattttaagatgatgaaagaaaccagaatatgccagctctaaatatgcctcattgacgtaaatatttttgagctgaagggaattaagaagcacatgcagaaaagctctctgcctcttctatttgcctaaaagcaggacagagaattacaaaaacaaaaggtcttttatgttcctcctcccctttcctgcctaaagacaagatgtaaattctcctttacaacctttaccagctgagagcctgcttcagaaaaatctgggaacagacttgactctttcccacagttctctggcctttggaagcttagggctgttttcctctttgtcctgtcacttctctacaatgtattgatcttgttgaatactttgtattagctgggattctaagccacactgccttgagttacttttcacctgcgtgatgttcatgtattaatagacttgtttgtttttctcttgttaatctgtcatttgttacaggagactgtctcaattaaaaacttacgagggttcagaaaaattataatttcttcccaacaatgacaatagcagagcataaaactaagcacagggcccatgtgagtatggggtcctgtaacagtgcaggtcacaggcctatgaaattgcccctgcctatgaatttcacctgactattccaagccaagagctacttattatctatgctgaacatttctaatgatttccatcttttccaatagcagaattcagtggtctcaaataattcagccaactcacattatagaactcaagtctatgtaactccaagtcactgttcatgcactatagtcatggagttctttttaaatacctgtcatccccatgttcaaacccttcaatgtctccctagtaattaacaaaatttagtcaattttgcctaaaaaatatcggtgagctccacaacctgaattccaacttactttccaaagcaaactctcattaattactgatgatgaccatgaggttttggagagggacaaaaccatctccaaatgtttttgagtgtctcctgtgtatcgtgtcctgtactagatgttttacacatcaactcatttaatccttatgagaacattgaaaacaaagttatccccattttacagatgagaaaattgagattgatagaggtaaggtcaccttacacagttattaactgtgagggtggattaaaatccagatttctctgtctctaaaacctcaggctttttctactgtgccatactacttctaatttgaactgtattttccagtgaaatgagattaatcttccctatagacatgccaggtacctgttatcactttattctggtatccgctccattttttggcatcctatgcttcttccatgcctgactttatctcccgtttgagcctctttctctgccaacgcccatagaaataaaattcaaatgaattctcttgattattcatttggctcttctgttaggcagcattgtgttgcatttttaaaaattatatgtaaatctccatttcagaagagattttgagctcctcagggcacgaaacgtatcacatagctctttattgtctcaagtactagcatagtgctttgtatgcaatatttaattaatattttctgtgtgggtgaaaatgttaatgtcttttttgttggacattcatttccaaagcagaacaattaacatgactggatgtttaaagggtctggatgaataggtgagtgaaggacagaaatgtgctggtaaaaagccctgatctatagtgcttgccaatttccgtggtgtaaatacttccactatagccaattttaagctaccaacagttagagccaactcacaaaattcttgaaaatttcataatcagtggttttgtgtgagccagcataagtcagcttcggtatctctttgagggatttaataatgaactcaactaaggtaaaactgatctggaacaactgaaagcagaggttaaagtaaaataactctgttatttaatctataatcaactatgaaatgcttgaattagagctgcctgtgagaaggaaaaacaatgattccataatgtgaaggctccagacaaaggccaaaagtgcatcaatgacttcttatcccagttttttaaactaaaaaaactgctagctaaatgatttttgttttatatgacttttgttttatatgacttttgtttatatgactttcctcccaaatctgttagcatgcatagagtttcagtttttctttcatcttctcctcttctgctcatttctctctttttaaattttatcataaagtggaacactttttattcaagagaaatcaattcttgattgagatcagaaatctcttgccattcacattagagttgatctaccacaattgcctgcttcatcattttcattctattggaataagtatttacagctataaactatcctgcatcttacatatttctattaaacaagaacaatgtccgtgacagttttctgtctcaggatttatcttattaatatttattgtattgttatgagtgcttagcaaattattgtggttaactttaccaatgcctttcaaataatattttgaaattttccctgaaaggatattgagaaaagccaaatgtaaaaattattgttttttttccttgggatttgcatgttttgaaaacgttctcaattgttagggaagtcagctgtaaaacacaggctaaatatacttttgtctaccaagaattccctttacttgtctgtttcgtgatttgtttaatctttcttagttatgcatgtaccattttaccatagttacctggagatattcttgtctctgccttagtttggcaggcttttcaagtggctcactgagctactgtttctatttcttttagaaagttgtggaggcatttattactctcataactgcctcaaaatctcaagcacatggcctagttaaatcatcttgaggttctgcccatatggttgcagaaggatattagtcattggaaaaaatgggtctaaaatgataatattcaaagatgttttccaatattcttggcaatcttattcactaatttccacggacatttaattagcaagaatttaaagaaccttgttttagtttcctgctgctgtaatagaatatcacagactggataatatataaagaaaggaaatttattgggcttatggttctggaggctgggaagtccaagaggcatgacactggcacctggcaagggtcatccaatggtggaaggcatcacatggtgagcaaggacgagagacagggagaaatggggctgtatttatctttttatcaggagcctactctgtgatactagcccactctcatggtaaccacattaatacattcatgaggatagagccctcatggccgaattatctcttaaaggtcccatctcttactactgttacaatggcaattaagtttccaatacataaactttaggagacatagtcaaaccatagaaatcttaaacttcaaataaacagggattttttttagtagcacagtataaaatgataataataaatatcagatataaaaaatttctgaagttctttttagatagataaatcatggttactattatcttcttagttacatttcattgcaccctattttctgtggtattatcagtcaacatattatatatagtaagacacattaaattttctgagcttgccagggcatcctgtcccctaacagtttttgataatgatttatcaaatgtgtactctttagaattttagctgtcagtaacagttgattttcacaacttttattagactatccatgatgttttttggaaaggtagttaaaaggataaatacattaattatcataaaattatctaggaatgcttttaaatacatttgacataatacattaacactaaaaggaaagcaaatatgcacctaataagcacaaaataagattaatcagagaaatgtgtccttgctgttttggggaagagttatccagatctcaggtaaggtactttttgtggagataaccttctgttttatgaagcttgtaacaagataacaatcaaggcatttttgtggccatgtttatgtatatgagcaagcaatggcaagtgagatactagtttgggggcttaaataagataaaagtagttaaactttattaaaatgcacatattaaaataaattttgaaatacattgtattcaaatattgtattagggttctcttagacaactcataggatacccccacacacacattttatgtgtgtatgtatatatatatatatatatatatatatatatatatatatatatgtatatacacacacacatgcgtacatatatatacaggagtttattaagtattaacttacatgatcacaaggttccacaacggctgtctgcaagctgaggagcaaggagagccagtcccaaaatcaaaactgaagaacttggagtccgatattcgagggcatgaagcatccagcacaggagaaagatgttgtcggggaggctaggccagtctctcattttcagatttttctgcttggtttatagtcactggcagctgattagattgtgcccaccagattaagggtgcatctgccttccccagcccactgactcaaatgttaatctctctctctttttttttgagacggagtctggctctgtcgcccaggctggagtgcagtggcacgatctcggctaactgcaagctctgcctcccgggttcaagccattctcctgcctcagcctcccgagtacctgggactacaggtggccgccaccatgcccggctaattttttgtatttttagtagagacagggtttcactgtgttagccaggatggtctcgatctcctgacctcgtgatccacccgcctcagcctcccaaagtgctgggattacaggcgtgagccaccacgcccggcctcaaatgttaatctcttttggcagtacccacacagacatgcctaggattaattctttgtacccctcaatccaatcaagttgacactcagtattaaccatcacaaatatcataacaaatcgtgtgaaaggaggaaaggggaatagttttacatttcaaatataaggggtccaagattcccttttatagttataaaaattagaaatttttaaatggtatgaatcacttatttcaaatagttgtatttatgatgcttttgtaatatatatgcataagtttacctatatatttatatatgtgtgcatgtacatataatgtataaatacacaaaggcactcatatctacataatgatacatgattctttggatgaattaacttttacattttatgcatacactcttattgtgtttcttgaccagtgcttggtcacagggatcaggacaagttagaagggaggctatgggaggacactgtaaaatattaacacaacttaattctgcagaaaggccagttcacataggaagatggtgtcctctgagggtgcacttacccaagctgtgttccccaattgcttaggacagtcttccatgtctaagtttgtcatgtggcaaacaatcaaatttacctggtagtcctagtgatttgcagagctcactgaaatgccatcgtttaaaagcatcattttaaatttattgtccactgatagatcaaaagatagaataccctattccaagagaaaaactaaagacttctattagaaaaatttaggtttagcacttctaaatatcactatacaacattttgaaaaatgttttgaaaaaacagttataatgcttagaaacatttagaagaatataagcacacaggtattgtgttgaaacacattacctacactttcaatgcaggatgcttcttctcactatggggcagcactttgtgaatttttctgtttcacagtattcagaattcattagaacatgtttgattagaatgcacatgaggcaagcaaaattagcacagtctgtctatcaagccacgtagatggccttgcaaagagctgaatgctagtatatctaagaatatgagattatatgtatgattcatggtggaaatgtctcctttgttagataaattcctgcaaaccaatgcctggaatgccctctctgcctactcgaattctattagctctttaacatccatttgaattcttatctcatctacaatatcttcagcaactctgaagcctccattgtcctctcccttttcacttcaaggctgtcttgcattgttatgtaactatttcatgggcctagatctcatttttcttaataaagtttaagctgtagaaaggaattcatatatttccttgatttcttttaaacacttaacacattaagaacataaaacatacccagtaattacttaaagaaaaaaaagactaagtaaaagggacaatgaaagaataatagaaataaaatgaatttgtttatcagccagaattttgggtgggtcctcctcatagctatgtatagcaatctataatttcagtgctatttctacctacttctaataaaaatattcccacagtaaaggggcaaggggaaattccaccattttgcaacattttggtgattagaattgttgagatatggttttagacagagtttccttcttattcttgggctggtgattttaagattcatttgtgtgttttaggtcacattctccccaaatctcatttttgctcaacacaagaacagtaagagtaagctgggatgccttagtgatatggcctggaactctgcagcctacataatactatccctaccttcaggtattagtgttgctaataacatgctcaactgattcattaaaacaaaggacaaaaaaataaacaaacataaaatcattttcatagagcttaaagagactatccagagagacatttataaagttaccattataaaatgcttcacactaaaaaagaattctttacaataatttggttgtaaattgtgtaaaattctttttccctccatcaattttagatttattggttggagccttgtaagtcagactgacaaaagacagattaacaagagaaaaacaagcagaagtttattaccatgtatatccctcttattcatgggagatgagtaactgaaagaggaggttagaacttgagctcacatagcatcttaacaaaagaacagtacatttttaaagaagtgacaagacaaaggaaaaggactttgagtttctaggatggcaaatgatgggaaagcaaatatatgggggaactaatggaaaataaggactatttagtaaagcttgtcatgcagattcctctggtgccctctcttgactgataagtctggaatagtcttcagtgattaacttctgtccttccaggtaagaggggaatgaaaataatacctttatatatttatctcctgcttttaggcaaagggggagagcagagagcttttcttgtatctgctgcttcttgattgctttcatcttgaaataatctttataccatatttttggcacattttggcataatatggcacataatcctgacatggcatattttggggtgccatattctgctaccctccaaattgtctctacccttctattatcttagcagataatagtacaacctcccaaattttggtttccttctgtgaggaaaacacagtttgtgctgtgaccagtattgtagctcctggggaaacctgtgtggtctcctctctcttctccctgctactgtaatactaacaaaaagaatgtttaaaccataaattgaatcttaaagcaatcaagtacaaatcagagttaggaaaagttttaatcagcaggtagaaaaaggatctagtgtgcttttatttttaaatttttcattaatccactaaagcccagcttgttatttttaccttgtttcatctaaaattaccctaagatgctggcatgacctctagggtgtgactaaaatgtgtttgagtctttatttgacatttaagccagccatgaaaattagcattggtttagagctccagggagcaaagaagtcatcctgagtctgaagaatttctgtggctgtaacttggaatttcatacaaatttgacctgtccaagacttgctttaattattcactaacaccagcatctggctttaacacatcttcatgagtatcatcagaactagagaaaaaaaattcccttaagaaatttttgtacataggtcactctcatgtttgttgctaataaaaattttagaggtcttagtaatctaaaaaatatatattttacctgtaaagtggtactatccaaaaggaactataccaaaatacgtcagacataaaagttaagaggttatgaaaatgtacatgcaattctctttttgcttgttcttagtttatttactgcttgttttcagatagtcaggtagttactctttagagatgtaaaataaagtatggacatgaaaagtagttatttaccaaaggcaattatcaagtatcaaaacatgcagagtacttactgccagttcagggagacaacaaaacaattatatataatatagtagctttttagcccaatcttccaataattgctaggccaacatgctaaatttaagagttctttacctcttaaatttagtagtctcagtaaataaaatttgtttagttctgcaggggcagaaagatgtgatactttgtccctatcataaggtcaaggacaacacttctctaatgaaagagggttcacaagagaaaaacataacacatttctttaaccaaagttttatatgacatggaagccttcagaatgaagatttgaagacccaaggaaaaactgtccatttttatgcttagattcaataaagtgtgaacagccatgtagaagtgttattagacaaacagggaattatctaatagtaatgaactgagtggggaaacccagcaatacctgtccagattcttcttggcctcactgttgtaacatctcttcaccctcctggcttatttggtatagttccttttagacagtactacttcatagataaaatatatatattttgattacaaagactacaatttttgtcagcaacaaacatgagagtgtttcttcctcccttgacctactgttgaccaagactaggtcatagaatttctttatggccaccttctagacagaaaggtagagaaggttagagtaataattcttgtttttatggccggctttggggaaaagggggttttagtttctacggcctgccctggggaaggggaattctgaattctatggctggttttggggaagaacaaggggtgagaggtaggagagcaggagaaggtcagagagaccttggctctgatgctgctactgaggccttccagtgtcctttagttcaaggtgctcggcatgccaaagcagcacattcaggatatcattttctgagcccaacagttccatattctgcccccaacttgttgcacattggaattgttcatggacttacaaaaatattgatgccatatcccagccctagagattgtgacttaatttagctgtccccaacctttctgataccagggaccagtgtcatggatgacaatttttccatatactggggctgggtgaggagatggtttcaggatgattcaagtgcattacatttattctgcacattgtaatatataatgaaataattatacaactcaccataatgtggaatcagtgggagccctgagcttgttttcctgcaactatacgatcccatctgggggtgatgggacacagtgacagatcatcaggaattagattctcataaggagttcacaacctagatctctcgcatgtgcagttcacaatagggtttgcacccctatgaaaatctaatgtgactgctgatctgacagcaggaggagctcaggtggtaatatgagttagcaatgggtagtggctgtaaatacagatgaagcttcactcactcgcccaccacttgcctgctgtgtggcctggttcctgacaatcatctggtcttctcactggtattcatttgttcaattagcatttgttgaaattcacatctatgccaggtgctaaacccatatctgtgccagtggccacgacctgacagtcatctggtcttctcactgatgtccattcattcaattagcatatgttgaaattcacatctatgccaggtgctatattaagtactgggaaattagtacaaaaaatatagaccttggagattccagtgcaatggtaaaaatggactagaaagcaacacactgggataactactgcagaaaggtcagaggttaagtcacactacctagggggtggaggagattgttggaaagaaagaaaggatcaggaaaggttttgtggagaagctgtagtgttggcctaactctagaactgaagataaagaaaaggaagaaaataggtgtaggagaagagaaagggtatcttagagaaatgaaacagcatatgtaaaagcctggatgcattagaaatcaacttgcagccagcctctcatcttatgttttctctaacttatcttgtatatcattgttgaaacatttttctcacagcactgtattacacccatcaatttcctgctcaaaaatactctggatccttactaataacagaatgaattctgcactgcagacgtgacattagggcatgccagatcctcctctaaagcatttaaactgtcctcttcattgtctatctgaagaccccaggtatgttttcatctcttcatttttgcttatatcattcccctgcaccagaatgtccctcctactcctttgaccatgtaactgaatcctccctttgttcagggttccttgataccactccatctctcatctcaatcttttagcatttatgtttacttttactattcttgtttgttggtaattagatggtgccctaaatatttatctatatctttactttttaatgaaattgtaaattccttacagaaaagcataggaccacattcctttatctctctttctgcatatggtacaatgccttaaaataaacaaaatttatttttattactgataacaaaactgaatgacaataatataatgagtttggaaaatggagaaaccaagcatttgcataattgcctagtctttgatcattgatgcacactacttttacataattataatgagagtatacaaattgttctgtattctgaaattttacttgacattgtatcatcaacatttgctatgaaaaataataaatatcagctgggcaaggtggctgacacctataatcccagcactttgagaggccaaggtgggcggatcacttgaggtcaggagttcgaaaacagcctggccaaaagggtgaaaccctgtttctactaaaaatacacaaaaactagctgggtgtagtggcacaagcctgtagtcttagctacttgggaggctgagacatgagaatctcttgaacccaggaggcagaggttgatttgagccaagattgcaccactgcactccagcctgggcagacagagtgagtctctgtctcaaaaaaaaaaaaaaaaagataaatatctttggataataactaaaagcatcatttacctggtgtgccaggtactgctttgcttacactgtttcaacttttgtatgtatgtccttattccaattccatgaggtaacactggtgttatcctggggaaactgggagcactgagctcaaaaagagtagagctgtgctacttactaggtgaccttggatacttattttacttagcgaatcctcagtttccttatctctgagatggggataataatggttcccacctttcaagattttgaggggatgaagtgagatgatggacacgaatagtgcctggcagatggccaacactcagtgtgctttagctcttgctgccgtcactgttgctggtcccattttacaagtcaggaaactggatcaaaggcatttaataactctccccaaatcacacacctggtgtgtgacagagccaggattcaaacccctgtcccaattatgacatgagatagggatcacagaatttaatacgatgttgtccaagtgtaacattttacaatttagtgctacagagaacatgtgcagagttttgagagaaaacacagttggatatctacagattatcttctgcttggagagaaagagaaattgagagagatagagagagagagattcccaggggcccgagctctctacagcagcacagcatggctgggtcagggctcaggatagaattcctgactgcctcctcccaggcggtgtcataactggggcttctgaagcccaacacctgggccctctccttgggtctcaaatggagggttgaatcctctcatgctcacttactaacaagaacaattcccactttcaatggggtaacagtctgaggggaaatgggctagggttttgcctggaagtacctagttatttcttaactttgtagtttggagattcagcataaaaactgaagtcagccctgttagtagtattgctgcttatacagccgtccacccttatcagaggggaataccttccaaggctccccgtggattcctaaaaccaaggatactactgaacctgattgctgtcaatcagaacatattcctgtttatgtcttccaccacacatttaatgccttttctatcttaactaaccacttatcacacactgtggccataacttttgcagtttgaagtacaacagaaaaactagcaagaatttcttttcccttcttcacaatttcaggaagagaagacgtcttaccatagatcttagcaacctcagcatacttttttttttctgccctcattaggttgagaactttcccttattcacttaaaggaggcactttgtggcttctctttggcatatccaaattgccagcatcactaaacttatgctttgggggcattattaagtagaataagggttactggaacataagcattgtgatactgtgacagtcaatctgagaacccagagggctactaacaggaggagagtgcagactgtgtggatttgctgaacaaagggaagattcacttcccaggctggacagcacaggatggcatgagatttcatcatgctactcaggacagcacacaatttaaaacttatgaattgtttatttctggaattttccattaaatatttttggactgcagttgactacttgtaacaaactgtggaaggcaaaactgcagataagggggaactactgtaatagttactgcttatactgctcttgctatttgccatggactaagctaaacacattacatacattattttctataatggatgtgacaatcctacagagtagctactattatctccattttacagatgaagcaactgggcatcttaaccattccagctactgccatcagcatttgccttaggaaaaaaatgtgttttgaataatcacttccagtatttgggatgattttcaataattctaccagcctaactatgaagttatattatctaggaggcctctagttcttatttttaatctttgtaccttcgagtagcttcttacctctgtaactcactcccacagtaatatttcatgagaagccagattctctggactattggttaaattcttttagatggcagtgtttgttatgaaaagacttttcattcttctggtcccttcactggaaacagctagaaagtacaagttttgattacagttgcctaaacaccagttttgaaatgtctttcatttgcttgagcaataaatttgttgctcaatcatactatcaaattgaaaacaagaggaaaggaaagtcaacctaacctaacccaaaaggggaacatgtttcctgggatgagaatgtgtcaaaggcagcatagcatgacctaacacttctgtgtaatcgtggttgtatcatgtgttatgggtaaattatctattctgtaagttagtccagtgtgtgcttcttcaactaactgtgaaagcattcttgaaagaccatgaaaccttattattctaattaccaacacaacggattgataaatgaatgatgaggccaggtattattgtcattaaatagacctcgctcaattatttatcaatgagtctggggttacagctcagagagctgtgcatattgtagcacggtttgcttcagctctgagacctgaagaccagattacagtcttggcaggtggcttttgttgaatgcaattcaagggggtggtacacatttgtttcagtcagacatttggatggtttgaggccaacagatattcaaagtttatccacaaaagcctatttcattttaaccatgtagaaaaatctctttaatttattcagataaatacaaatgagtaggagaatggattagctgtagaaaatcatacatgtaaagatgttttcttgcatcttagtgttctaaagactgttctttattttcttagattctgctatctgtcatggacacttcactgttctgtattgatcaatgtttatcttcatatgagatttgtttttgtatcttctttctaattgtacaatgaaatatgttttctggttaagaaatacgttatcaaggaggatagaattgggtgatactagtttttttccatcctgaaatcatgccagctcattgcaaaggtcagccctcaaaatagtattaaggcatgccctctccttgagtctctgataccttgcagcccaatgtcccttcttgaaggcctgtcacctgcaagagtactttcttacatcctatgagcatcagatatgggggaatgaagaatctcttcttgctaaacaaatattcttggtccaccttctgccccctggctttattttaaacccatccccaacatatctgatgagttgagtctagtaattctgtcttcagtgggctatggggagcagggattagctaaaatggctgttcagggacctctttggtataaaacttggtgggggtgctggcagggatctctcagagaatgaaggaggggatagagcattagagaagaaaagaaattcatacctgagattatgtaatagataatagagtctggactttgtttaaaaaccagaatctaagatatatatgttgaggctagggcggggtagtaattgaaagagaaatatgaaactatacctagcgtcaaggaaaactaacagtaattgaagagacaaaaataaaacttgtttatattgttcaaaggaaaatgatatttataacatctgacaaaaactttattaatgccatgtagacagggttttatattattaactgagtttataattaattttgtactgattttaatttgactgttaccttggcttccttctctgtttcttaagttttgctagtttaatgttcacgagctcacaaaattaaaaatcttggtagaaatatggagtagctatttctttacatcctttttagaacaaagttgtgctttcgaattgaccacttatctagaaagtgatataaatctaataagcaaaactggatgtcttttaaattatctgttaaataactagagcagtggagatgtcctgaaagtgagcactttattacatatgaaaaacaaattttaattttactactaagaagaatttccatttctctatttatatgtgttcattattctagagattaatatgataactcctatgtatacttagttttgtgaatttcaaaattcttgatgccaaataactgaagtatagtaaattctgccgtaacatgatgtatgggttcctaaaaatcccgacactatgcaaaattgggcaataaaaacacattttactaaaaaaatggggataggcacacaatacctagaaatatcactagtggcacattacaaaaaatatgggaatttagtaacaatgacagcaatattttacacatgttaatggttaagaaatttacaataaatatggcagtttactttgaaaaagacctaacgttccctgtggaagttggccttcaaaagggtgcagcttgtgagtttttgagaagtgttgggaggagagtcgttgttgtcccagttgtgagcaggtggggcttttctacctgtgtggggaagtgtggtagctgatggatatggtatgtggattttgtgtattcctacgctgcttggtttagctgggtgcagttttctgcatttacctggcgtttcttgtggatagaatcacatataagcaaatcccagacttgtgttgtgatcaaattgttccgtaatatatcaatcatgttagaacaaggtcacggtttcaaaaccggcattgccgtagaattgactgtgtaataatcccttcaacacgttcacatctatgatcccaccttgttcttgccaccatcttagcaagcaggggtgcgattgcctgaccatttgtttgttttctgggaaatcttgacctattaaaagccacacagttactgaggaaacctgtgtcagaccttgcctaggtctgtgtgagtctgagtcaggtttgctttcctctgaaaaatcagacactcatgtatgtgggacaaagagcatcagaaacatgggcaaggtcatagagacagatcccagagactggattagaacccaacttgcttgattttctgcttagaggcttcagttcaccattttagaaagtgcctgctggctgccaccctccctcctgtcttatcacctctaaaagacattgttaatgcttagacaggatgtgttttcttcattgcatggatctaaaaacccagccatgagaacttagtttttaatttttgccattgctttattggatattttagaatgtgcaaaaggttttagaaattgtttttcaactaattttaccagcacagaggtcatgtcaaatgtcagggtgtttgacaacaaggccaatctagtctatcaattgagtttcagagaagattaatgataaagggtgcaatcccaaagtctgggaatgactttgctttcaagcattaattattgtggaaaataaaattattagatactcccttgtctacatctaccccaaactatgtcaatcagctctatttctagaaggtttacatttattaaacactccctgtggtcaatgcaatggtcaatgctatggaagttacaacaagacaagatattgtgtccgctatcaggaaactgatttgggagttctgtttgatgaccgaagagagtctttaccactgtgcctatatttttatgccagaatatgggtgggtgcacatgtacaggtgagtaatgaggccccactccctagtattagttaagttagcaggtgtgtgctgtttttttggtcactgtgtattgcaaaattctgagtttggcactgatactaaggaacatcttacagaaaaaattccccactgacccttcttttttttttctttttgaaacagaatctcactctgttgccccaggctagaatgcagtggcacaatcacagctcactgcaacctccgcctcccaggttcaagtgatcctcctgcctcagcttccccagtagctgggactacaggtacacaccaccacgcctggtcgatttttgtatttttagtagaggcagggtttcaccatgttggccagggtggtctcgaactcctgacctcaagtgatccacccaccttggcttcccaaagtgctgggattacaggtatgagccactgtgcctagccagacccttcatttttaaaagttgactttatatgttaataggagtttaattatagtcatatgttgaagggtcttttctgtaaaaccacatattccaggagccatccaactgaggacagcattgcacttgtggaaccacaatccaggcttgggttatctgtttctatcatgacagaggctactccatcacttaaactatatgttctgcagcccccgagagctgaagacaagcctggattgcctctatttgtaattttcttttttgtaaatttttttttggtaaattgtttttcaaacaaacaacaaaaatgactgtcccagtcagttcaagctgatagaacaaatggccatagaccgggtggcttaaacaacagccatttatttctcacagtgctagaggctgaaagtctaaaatcgaagtgccagcatggtcgggctctggcaagggccttctcccaggttgcagatggctggctccttgtgtcttcatgtagtggaagcagggctagctagctctctggccactacttacaagggcactaattccattcatgagggttctacccccatggccaattacctcctaaataccccacctccaaataccatcatgttggagattagatttcaacatacagattttgatagggacaaaaacattcagtctataacaatgatcaaataaggttacaaaaattatagtgtatgtagcatgcttgcattatgttttgatgaattaatgttttttattatgcataccaaagaaactaatgcaactgctgtaaatgtataaatatttgggagtaatgttaaagtttacatttaaagccctttctaaatgtgaggccgaaagtattccttttctctctctttctcttctcaaccccatttactttacagaatgatttttctgttttaagtcataattgctttttttttacaggattaagtaccaggtcattaagtgtgttctatgtcagtttgacctaacctctctgcccttttcttttttctaaaggaattctttaaaaagaagaagaggaagtattttaaaataaacatttgactgccagaatgtgatgtaaacttcaggttcaattctacacttgatagaaatgaaaagaactagtgttctctattttgacatttagcatcaattccctttcagtgattccagctgattagtaagtgagactaaaatatcttactcttcctggtcagcatttaaaaatttaaacatggattgaaaatttctaggttatgaaatacagtctaggttcacctgtgaaggatctagaagaaataagactgcagacctggtaaattcaaatgtccactacttctgtattctagtcattgcaactcacctccttttatcccttatgttatttttattttctcagggaggcaaaaaaatttgtgagtgaaaatgaaggggctcttgggaaaggaaaaggaaaacggtggtttgcatttaagatgatgatggccaaggtaggtatttttatagttgtctggtttatggcatattgcctctaagaagaacactggttcttttctaaaggggtgaaaaaaatcttacattttgtatatataaaacacaaatactcatacagtatatacacagtatatctgtggtattgaaatttacaggggagatttaaaaaattgttcttagaagagttaaaatgaaaaataagtcaagaaatacagatttatggcaaaagacttacttgtgtgactttagcacttccaaatataaaagattgcatcctttttcattttcattctctggaagtgaaggggttctggtcaagttgtttttctcaaagtatctgtatagtttttttctaccaggaacatcaactatacattggacagaaaataagaaaacaataaatgatatactgatacaaatatagattttggggaaagacagaaaagcaactaacatttatttaacacttactatgtgccaagcactgaattgaattcttttataaagttatatttaattcttacagtaaagtaggaacatagatattattatctcctctttacaaatgttataccaactgtaagctaaatgtattcccataaagttttgtgaataaagttcatatatcctaactttcatatatatatatactcacatacaatagattaattttgtctgtttctacagtttaaataaattgaatcatatagtatctatgcatttgtttctggcttctttgatgcaatgttatgttcacaagatatatccacgttgttgtgggagttatacttcatttttattcatgtgttgtagtctattgtataaagatgctgtgacaatgtatttacccattctattgtagatggacatttgggctgtttctagttatgagtaatcttttttttttttgttcatttttaaaattaactcatacacaattacttgtcttctggtttgttgaaacaataatgcagacatttgctacaacaatgactgttaaaatggctggccacaaaatctccagcaatacattaatctgaagggcattcttgatgaagttgactaattttgccattttcatccaccttatagtatttcaggacagccagcttaaccttccttttcttatgcttattcttctttggagtggtgtaagacttcttccttttcttagcaccaccatgaagtctcaacacaagatgaagagtagactccttttgaatgttgtacccagacaaagcacatccatcttccagtttcttgccaacaaagatcagtctttgctgatcagtagaaattcctgtcttatcctagatcttggacttcgcattttctattgtatccaagggttcaaactccagagtgatggtctttcccataagggtttttaaagaaaatctgtgttttggtggtggttccactgcagaaggcagatgggaaaaaaagcgtgggtgatcttttgaacttcagacttgtctcatgctattatttagacaatagtgcctgtccagctcccacttcatcccagcatttgcatacatgcaaaattctctgccacattctcattcttcctggtggtcctcttgactatggatgacccaacattggagttaaatagaaagaaggccttttgcaaaatgattttatgacttgttgtcttctctttcaattaagctgaccaatctgcctctaccagaatgcagtgtctcatgtcatacaacttaccatcttgtattgaactcacctatttgtacacagactatcctggtagatcagaaggctttcaagacaggacctggaaataaaagacagaaaataaaatttattttgtttattatttttattatttattttatttaattattcatattgagtccttcatacaatgaaaactaattaaacacatactctgttccaatcaccctattatgtgctaatcccctgctttcttattgtgttatataataaatagctgtttctgagaggccagcatattttccataaaacaggggatcgataaacatttttttgttgaattaaattggtctggggttagtggagaacagggaaacaagtgaaacctactgtttccccctttgactagaaagtagtatttgctgccagagagacatttccaagcttactgcattgtaatgttttgaggtgggggataaacatcttgacaaatcaagaggttggactttacttttgtatttgactttcttttcagaaatgggcaaaattcctccgtgattttgagaacttcaaagctgcgtgtgtcccatgggaaaataaaatcaaggctattgaaagtaagtccttatcagatctcaggtggagaaggttgtcttagagaagtatctcataagcttatcagatgcctttgtcagtttctggacttttgggaagactagaaacaaacaaacaaacaaacaaaaaccaaatcaacaaaaactttgtttatgcctgctttcgtcactgtgaagatttgctagcacttaccaaggacaatactggggaccccactctcgtgttctaccttagtccaaaacattaccattctaacctggttttctctcctatacagggaagtcactattgtgcacaatgacattgaatcatcttacttggaaggcagagattttattttggcaatgaacatgacattgagaatatatactctcatgaatgttagacagtaatcaaaatgaacaatgttttaacaagtgaagaagtcttagtctgggcgcagtggttcacgcctgtaatcccagcactttgggaggttgaggtgtgcagatcacttgaggtcaggagttcgagaccagcctggccagcgtggtgaatccccgtctctactaaaagtacaaaaggccgggcgcggtggctcacgcctgtaatcccagcactttgggaggccgaggcgggcggatcacgaggtcaggagatcgagaccatcccggctaaaacggtgaaaccccgtctctactaaaaatacaaaaaattagccgggcgtagtggcgggcgcctgtagtcccagctacttgggaggctgaggcaggagaatggcgtgaacccaggaggcggagcttgcagtgagccgagatcccgccactgcactccagcctgggcgacagagcgagactccgtctcacaaaaaaaaaaaaataaaaaaaataaaaaataaaaataaaagtacaaaaaattagccaggcctggtgcaaaagcctgtagtcccagctactcaggaagctgaagcaagagaatcacttgaacccgagaggcggaggttgcagtgagccgagatcacactactgcactccaacctgggtgacacagccagactctgtttcaaaaaaaaaaaaaaagaaagaaagaaagaaaaaaaacgaagtcttaaaacctcattttcaaatctctgaagtagaataagcaatagtcatccaggagcttgctatctgaatattcacattgtgcctttattttgtagaatattcataggaaggaaggaaggaaggaaggaaggagaatatagccaatcaaaaacctatttagtttagtgctttaggcttagaataaggcaagtaaacattttaaaatattgtaaataaaaatagtaaattgttttttaaaataataatctaaaaaaagggataacatttgaaacaattttgagcacaatctttccatattctggtttctaacggtttcaactaggatctgatttccatccattcctctctagattggaggcaggttttcctgctggttaagtgtggcgttgtataattaaaatggaggctccatagggagataacacagctgatggatagcttgctgacatgattgggcatgttttaggagtggctaaccctcggttccctgtctctcaatatcagatgggaattattaagtggcaatgaattaaaatacatcagctcattaattgtatccccttccacacattcccagtgccatttctctcttgctttaatttcctccttaacacttaccgctatctaaaatgctatatctttaatttaattttttgatgtaatcttaattcattttatgttcatttctcccaatagatgggaaatttagttttgttcactcctgcattccacttggcacttaataaatatgtattgaataaaattacagacaaactcgctaaatgtctaccaatctaggaaaaaaagaaaggaatttagatacatcaaaaaagagaagacatcatggatttcttaggtttcaactgtacagctcaaatgtggtaggttgagaggcactgaaaaacaaaaggccatttggagcattacggtcctgatacaatatatatagtaagaactctgaatttggtctttgctttgctgcagattagctgtttgacttctagccagtcatttaactcctctggacctcagtctactaatttataaaattgtagggctgagtcttgatcagttgttagataaatcccaagaaatttgtaattaatgataggtaaatatatacatttgaaaattatttttaaagcacactagagcaggttccagcctatcctaatagtaatatcatgctcatttgtgttccaataggctatagccagtgaaacaaaaacagacagaattatttttattgccagaaattgcatgcagcaagagttacacatatgaccaccatccatcatgagtgtcacagtagaaaagacagattgagagctatccaataataaccttcagttatctcctctcttcttctcttcttctagtaaatttggaaagccacgctggaaaattgaggcaaatgtagattatttttctttccatatataatttatgatttgattagtttgtcatgacttcttcactgttaatggtgctttgtctcaactgtgaagaactgagctttattttttattttatcaatattcaccacaccaccatttattgagtaccaccatgagtcagatgctctacaaacattgtttcatttaatcttcagtgttcctgcaatgtgcacattaaccttcctattttatagttgtgattaaataactgtcccagaattagtagcagagctgaaatataaggcaaaatctgtctgggttcaaaacgtatgcttttccatgtgttaggctgctttctcctttagggaaggttttacatactttttctttttaaatatgttttgcaccagttcataaaaagtattctacgaggccgatggcaggatgagtagttatagattttcttgatcgttatcaaggaattatttttcattttctcatgtatttactttttagtgagtgatttatttaattatatgttttgtattctataggatgcttaatgtactgattttaatgataaccatgaggctttgggctatagtattagttgaaaaaatatgaaacctatgtaagaatatattattagagcactggattggactatcttataaaaagtaccctactaaatataggtaaagcatgtatctgtgatcacctttgaaactgaacttaatgcaaaatgggaagaaataggacatgcaatggattttctgagttgaggactttttgacccctaccacctctgtagtttggacaatctgttgaaatctctggttctgtttccacatttggggctactacaatatctacaacatcttgggtttaactagtcactatacaagatcatttccagctcaacattctatgatgtgtaagttacagtcagttttacatgtatatgtaggcatgtgaaattcattaatcatacttttgattgataaatcctcaaaaatttgaatgcaaaacagatttatactaagaggggactatataattgccttctcaaattctttttgaaataaagttggttaagtgtgtaccctacttatagaatacatatttaattataaaacggatataaatgcttttctcttaaataaatggccatttaatcttacaaaaggttcagaagtatcattgtattccatttcgacatcagaatcatctaatatatatcttatttaatcctcagaataagcctgacattattgattaactgagcaaatagtggatgcctaacatgtttctaggcactattgctactgccaaagacagcagagactctaccctcattgatcttacatccaaatgtgttaatgtatgtatgcttggatggggaagacagaatataatataagcaaataaataatgacggtaattgtggattgtagtaagtggcatggtcaaaagaggagctgttgccttccattcccaacagcctttctaatccacttttccccactctctgctcagtatctagataataccaaataagtatttttaaaatgtggctaaaggagtccaaaattaacagcctttactgagttttcccaaagctctgtccaataatttgcagaatcaagagcgggacccaaattagagtctaaaattcatactgtttccatcttgattccagtaagacctagatctctttattagtgtgaagcggattctcacctgatgactcccaactctgtttcacttaaaaaatagatttgataattcctgccacagaggatactgtgacgttatgcatcacttgggaatactgtggggttttactgtcacgtcagccttaaggggatcatgcctaaaactcgatggttgctcctgtggacacatcttattcatctcattgaactgtgtatttttctgaagcaactgcatgtttgtacccccaggaaatataatctatacccattgtgatgccaacattattattaagaccataaattaaataattgaatgtatttctagctggggattacaaatttttctcaggatcaaaatctactttttcctaatagtagattgcatcatcaaaattatagtttcagaaacctattttttttcagacaggaaatagctttggataggcaagccaaagcacagggcttaaaccttatgtttccttgctgccctaaggattctagaaaatacaaatcaaatttgtcacatttaattccctacccctaaatagttcgaaaaaattgtgcttcacattctagcctaacatgatggtatttatattgtagtcacacagcaggtcatttaattggtcttttcccatttagaaatactcatatttatctgcttgtcttattacccatctattcaagaggaaatgatgtgttatgacagactacaaattactttgccttaataataaacaaccagaaagagagttgaaattttaactttaatttgaaagaaacaagaatattcaggaacaagaatatgcttaagcataaagcctcagtttaatacgtatcagagactctgttttttggttgttgttgttgtttgtttgtttgtttgttttttgagacagagtcttgctctgttgcccaggctggagtgcagtggcgcaatctcggctcactgcaaacctctgcctcctgggttcaagtgattctcctgactcagcctcctgagtaggtgggattacaggctcctgccactatgcccagctaatttttgtatttttagtagagacggggtttcaacatgttgaccaggcaggtcttgaactcctgacctcgtgatccacctggctcagcctcccaaagtgctgggattacaggagtgagccaccgtgcctggctgagactctgtttttatacattaataatttactatggaagcagcatttatcagtctgattaaagaaataagaattggtcattatgggcatcaaatttgtgaatctgactggctttagctgattgatggatattatctatacctattgtttcagaaacacatattcattgcatgtttattgtatatatcatagtcttaagaaaattaattgaactatgttttacttaaagggccatatagcagtgtggttaagagagatctagatttggagtcaaacacctgtagctcaagactgcctggtttagaagcctggcttccttgtttactagctatgtagcctatagatctaagtctctgtaaaatgggaaaacaatagttcccatttcgtagggatttgatgatcattaaataagttaatacatatagatcaaattggtgtttgaaacagtgattcactaaatgttacctattattaatcaacttttgattcagtcaacaactgtgttaaagtttttgtttcctgattcatagtgggactaataatacttaacctcattaagttctagtggcagcataatgagttgatgctgataaagttcttggaacacataactgaccatcaagatatactagctattattattattattactcattttgcttccttacactgagagattaagtatgttaaaattgctattcttttcatttatgctcttttagtcacactaatcaggcatttctttttagtgaacatcagttttagttaacaacatccggtaggatagaaccactagataaaagggataaagagggaagatttcttcttttttgtttttgtgttgagacaggaaaaactggagttttatgacaacttgttgtttcattttctctactttaagatcttcatttgttttgttactgtgttttctcctctgctattgataggtctagtgtggaagaaactttgtcttctggatttcttagtctcttccacctgtgtctgggtctttcctataatcgttctagttttaatgaaatctattggcctgcaattcattttctttacacttaagattctgtaaagactcaacctccaaataaaatagttgtgaagccactctcaaatctgagaactggagtttggaagttttggactctaaagtatatttcattatgatgcttaagcatgttggaggaggggatactttctgaaacatcttaattcacttctgtcttttgcatttaagtatatttgtaccctacacgcaagaaattcatttgtcagggattgtgtgtaggtgctgagaggatgggccgtggcaataattagaaaaacaaaagcataaaaagtgaggaaggaagaaaggaatggtgggttagtatcctatatgcgggatttcatactggaagatcttacatgcgattccagggaaaaacttacattgatacctagtgaccaaggctttcctccagtaaatgagtaactgtaatgagtaacaaactgtaagtccactgccttcaataaaacatgatgagtgaacctggctgagcagccctcaggtagtcgttaccagagaatgtagataacggccatgaaatggtatgaagtcactgggagccaagtgggtgatcagatgtcctaggagaagcagaccagtgcacctggtgacagtgctgggctgggctgaggtagggtggggtggggttgtgtatcaaaaccacacacccttagaaaccttatagaactctgcacccctcggcaatgtgaaatcaatccaaattctcttgtgagcataaagaaaaatattgacttcaaaatcattgattttttccaaaatatccatttaaagattgacttcttaagtttctaaaaaaaaacctgccactgttttacaggaataagaaagatggtaggtaaagaatagacaaaggggccaggtgcagtggctcactcctgtaatcccagcactttgggaggctgaggcgggtggatcacgaggtcaggagttgaagactagcctggccaacatggtgaaaccctgtttccactaaaattacaaaaattagccaggtgtggtggtgggtgcctgtaatcccagctactcaggaggctgaggcaggagaattgcttgaaactgtaaagcagaggttacagtgagccaagattgcgccactgcactccaacctgggtgacaagggcaaaactccatctcaaaacaaaacaaaaaaagaatagacaaaggtccagaaatagaggtgttactgtcctgtgaggccggcctcatctaagtaagtagaggctggaatttgctacccatgaaccttccttttccattgataatgcttccccactgataatgtttcaaagccagaaggctccagaaaatcattggtcaatagagatgtttagctgaatgttagctgaatgggacagaacacatgggctgatgcagccagggactgaaggtgtttgttgttttttcttgggcaactgacaatgataatttggaagattgggaaagctagcaacttggtgctgaatcttaaatgaccgtcaaagaaacttttgcttttgtaaatctatgaaatctgaacctaagacttaacctcttcatttttcttcttccactctctgctttaagagggtgctttttttttctctctctcccaatgagaattaaccaatcactttacttttcacttctgggggcaggggtgagttgactgaacattcttgcctattgcctattcattccccaaagctgaagtggttttttaaaagtcatgctcatcaccccttcctctggccctaatgcttaacacctgtcaatgacttctccttacattttaaataaaattctcactctttaccatgggttgagaggccccacacactgtggtttggcctctccatccttatctgtcaccactttccctcattcatgtactccaactgcacaggcctgagttttattcctcagtagtcccaagcccttgccccttaggatctttgttctggctttttcctctgcttgagctgctcttccccagctcagcatgttgctgtcttttcttcaaacttcagatctctgcttagatgacatctctgatgttctttccttgacaaaactttctaaagctacccctttcaatactttcccttccctcctgtaggacctgctattatctctatctctatctcctgtcatctacatctatagctaatgtctatgtctgtatctctatctctgtatctttctatgtatcttacatatttgttgtatccatacctcactaaaatgtaagttctattatagcagcacccgtatctatgacattgtgcttcacatctaagataatttctggcataagatgtgtggagtgaatgaatgaatttcagcttttataccatccctgtaaaattccagtaatgggggaaacagcacagaactgcttgtaagataactatccgtaaaggatgtggtaaactctttttgagaagaacattgtttgcctgagaaaaggaagagaaaatagcagtaattataattatagtgatagctaattactagctaggcactgtagttacctttacatatatttgctcagttatcagtattaactcaagaaataaaatgcactctgcaggtggcaatcatggctgctcagcaaaaggcagctttcccttggatggactatgatggggtaggtcacatgcagtctgcataactgcattctacgtaccttctacattccacatgacagggaatgcttccatcatgattaacattttctcttcctgaatagagagaaaagaatgctatagcctataaatataaaaaggaccaatgcctcacaattaatggattcattttgaaggcaaccaagacaaagctctttttgtttgtttgtttgctttgatctctcttcaaactttttattttctttgtaataggtcagtttggctcctcagtggcctcatacttcctcttcttgagatggatgtatggagtcaatatggttctctttatcctgacatttagcctcatcatgttgccagaggtgagatctgacttccagtttacaaaacatgctgaaaaatgtttctcctagaaaagtatttatctcttctttaaagtagaataattaactggctattttcacgtcttagagtcataggatttgtaatgagattaaccttcaaaatggtgcccatgggccaaagctcccaatccttgcactaaagggggtgtaagcctcttgaaattatataacttatgtataatttcacatgtatgtttaaatgtgtatttttatgtggaaagtttcatggcttctttcagtttcccaagggggtccctgttcctaaatgttaaaaactattgttcaagaggaagactttgacaccttgtgagttgtatttctttattttgccaagttagctttgaaagaaatgcttccttaatgcaactcaaagcctccagattttctatactgaagaaacacaaaatgaacattttccccctaagatacaaagtaagataatgcccacaacacacacacacacacacacacacacaaatagtgggatgggatgagagtgggatgggatgatgaggtccaaagtcagaaactaaaacacatagagggtccaaatcaaagaagacaaagccctgagctaatgtggggaaagggtcagctgaggccaaaaagctagactgaggtcagagccttcactcatatgaagttaaatgattctgacacctttgaatgcttaccttacagaagttggattaggttttagttaacctacaaaggaccttttaggaccagtatttcaaagcaaatttggtccatacagcattgacagtggccaaaatttggtggttttgggtgactttttatcccgatagcttcaaatcagtgccagtttctatactaagactcctattaacataataataataataatgctttacattcataaagagatttgagcttttaatagtacaaagcactttcacttcttttacttactgtgcgtcacaacaaatttatgatgtagactgtagaagacattttcttcacccatttaaaacatgtaaatggagtcacataatgctgatgtgacttagctaacatcttggaatatatttttttattaagctgatctaggactagaacccatgattcaatccctttctctaagattttgcactttaatccactagttttataatccttgagataattccagagcttctaaagttgtctggctcgtagaagacagtgaccaaagatcagaggtcctgtgtagtttatttcccaagtgcacactttcaggtaatgaagctgaatgtgtgtattttatctatttcaaattaaccccagcttttttttttttttttttttttgcttacctttctaaggaaatctgaaactcctccattccatcactggctactatgacgttacttagtgtcagatgcaggtataaatggagttttatcagcagcatttattctttcccccacaccatgctgcctccatgtggagaaaatgaaaggctgttgctgatttatttgaataatacgaaattacagaatgtctgctatgtagtggatggagtgcctacgtgttaggttggatgtattccaagagctaggaagcattctgtctttggatacccttttataggttgtattaggtgctgaggggcatcctgttttctgggcaatgattaccaactccagcaaaagaacaagagaatggacaccctgcatgctgactttgcagaaccaccagaggccagggcagtcatctcctggcagcaacgctgtatttttcagctgcctctacccgacgggctcactcagtattcctccaaggcaaatgcccttttgccccaaggtcctgtgtccctgggcaagcctgagaccttgatctcctttgtcctctgtgcccccgaactttggggcgagacagtgtgtctggaacccaccttctattctgttcggaccaggaagccagatgggccaaaggcctactttgggaggttgtgcagcttgtgcacagggagtgagcagagattgatgtccagcccttgttcagtcaagctctgcacccaggcttcaagccatattcatcttctgttcccagctttaggagggaagtttccatctcacagaagaagcaacatctgcttggtaagctatgggggctagaaaggtgctctttccagttctcaccaaggcaccttcctatgaccctattcttgccctctcactggcccactcttcccagtactattctccctaccgtttttctcttccaatctggtagcatgaatttgaggcagcagtcctgaattagtgatgaagcagacaccataatcagggtgcaagtgttctcacgttgcagacacccacaaattacatgattggatttccttgagttctctctcttgacatgaaggacagaatctccctccaccctcactcctaaggggtattctcttatgaaagtgtgggtaagattgttttgttgagtcctatgtgactcaaaaggctacctctctcctttccagacttccaagtcagaacagtttggtggtggtggtggcaatggggtcctcagaaagccctctggggaatgtggttgacctgactgctggtggtcccctgaacttggaatgcagggtcctttgcactccctttgttcttacctctggatttagtagtcgattcccagaaaatgggaccccacatggagacccaaagagtccccataaaaatgtttcagaagggcttttaaacaaaaccatttgtgatcacatgtgtggctcagactttgtttctaattgttcactgctttctttgcttcttcatacagtacctctggggtttgccatatggcagtttacctaggaaaaccgttcccagagccgaagaggcatcggcagcaaactttggtgtgttgtacgacttcaatgtaagtgtctccacacaagtgtattggtgggaggatggatttttatttagtttattttattctgaaacccacggcctcctctcctgggtcaggctgaatgtcttaagaaagacgtccctgctccctttaagaaagaaaggaaagaaagaaagaaagagagagagagagagggagggagggagggagggagagagagagagagagagagagagaaagaaagaaagaaagagaaagaaagaaagaaagaaagaaacatgtccctttatataaatgtgactatgatttaggacaatggtaatatgattatatgggaatatagactactggataaaggtgagctcagagttcaaagacttgaagcaaatattcttatcactgactttggaaaagaataaaggaagagtttgcaaatgtgctttttggaaaatcttgttggattcctagggaattaaaacttttacacttcctattaacctctttacttcctaaacaagcctcctatttagtattactcaatagttagtactaaataaagctaaatattgaaaactaagaaatactaaattctaacttttaaataatactaaaattagtattattccattgtagtattcaaatgagcattactccttgagctcccttaggtagagattattactatggaaaggagttatttctgtccattgaaaaaccattttggactatatgattcaagtcttcgacaacaatgtaattccacatattctttttttaagtagtgactagactagaaatgtctggaagcatatgcgtgggaaagtagccaggttgaaattgaggaattgataattcaagtaatttttggaggctagacaatgagaataaaattttatacagattgcagaatgaaggagggaaaagcagactgcctgtttatagtgttaatatgtatatctcacaaacattttgatttctacttttaacctccttaaattgtgagtttcccaaagaagagatcaggtctgctacatcttttcagcccgtaatctagtcctcatccactacaggctaaatgaatctcattgactgaaaatcctgagtgagggggatgattcatagagccttgaagtaagaaccacaggaccagtttatgtgaggagtaccagaacatgcaaaccttaagaaaagtttcccatctccgaatgaacaaagcaagctattgagttagcatgaggcacaatgatagcaacaaatatgtggcatttgtaatcttcaatcacccctgtcagttggactttccatttcaattcagcattttttaaactgaattataaacttgcataggttttacaaagatgaatgtgacatgattcttgacttcagggtactcgtgatattagaaggaagacacgtaagcaaccagtatacaagatgctgtgcacaaagttagcaaaatttaaaaaaaggaaaaaagatcctggggaactgagcaagtggttcttatttcttcttaggcgggtctgggttttacagaagagatggcctctgagttggattttacctctcttttctatcacttctagattttatttctcttttctaccacttctaacttcttccacctcttcctcctcccctccctttatccctccctttatttatctctctcactttcaaatttcaaataatgcattactatgtccctttaccactgttttaatttctcattctcttcctctgattagcaaaatgacaaacttccagtctgcttaataagaacaaggacgaagatcactgactttttctgttttttaaggcatagcagagaaaggaaggactaaaaatatgaacaaaaggtcttttgatttttatatatagatttctgaagtttaaatacttctgaatttcccaatgcactgaaatggaaaattttgggcaaaaatgtccatttgagatttgaaagttagtgactcagttgaggaagacaaacagaaaagttgctgtaagagagttactaatgagtggacaagagggtctgagaggcaaattcaggggaaagtagagggaaagggtttggatgatgagtgtgcttcccaagattgtatcactgcccttgacagctctctcacatccagtttggtgaaatatgatttgtcggtcagcaggggatacagaaaccagagtgttctatgatagttatttcaaggcctgcctgaaaacaatactaaggcaatgagagaaattttaaaggtcaagaaaatataagaaagccattacactgattttattcacttacaggcttgctgcatgctggtatcagtcattaatttggtatgcatcattgctggggttagtagtgattttaatagctgtatttctccaatgtctgcatcatgcagtgaactgtgattggtaagtaaggtccctcacttcacaacccacttcatggtgggtatttatatctgagactaagctcgagtgttcttatatgtgaaatggagaaaataatagtatctacctcaaaaagcatcaagtgagataatgcatgaaatagcagatagctcagagtatgtagcacacagtacaggctgagtattccttatccaaaatgcttgagaccagaagtgtttcatatttcaaattttttcagattttggcatatttccgtatacataatgagatatcttgaagatgacattgaagtctaaacacaacattcatttagtttcatatacacctgtacatatagcctgaaagtgattttatccaatattttaagtagccttgttcatgaaacaaagatttgatggtgttttgactgtgacctgtcacgtgaggtgaggtgtggaatttttcacttgtggcatcatatcggtgctcgaaacatttcatatcttggagcatttaagagtttagatttttttttattaggaatgctcaatttctaaatattccttattacaagaaccataacttgaccaaaggcaaacagctattaggaaaccgaattgggatgcagggctggtggtattacacacggtaatgtatgtggatagtggcaagctagtaaaaggacttttattataacaaagaagtaaatacataagtaaataaaagtattctgaccttaatgaggagttcttgaaagattcaaggaaaggaagcaataggattatatagtcattatcaaattgttcattgaataacattattatttaaaagaaaataatactgctttaaggaattttatatgatatacaagttttcatgacttttgaagtttgaaagatttgtcttttgttttggcaatgattatattctaaattcagcaggaaagataggttgattcatattaagggacactttgcttttacatttttgtaagaaaaaggaattcagcccatcctacaataagctaataattgagcacattctctatactagggtcaaaataatttcacaagtacatcaataagagagagggaaggacctttaattattaaactgaagataacaacaagaaaaaaatgtacaaagcttaatttaaaatataggagatttggtttcacagtaaaaatccaaaagaataaagccaagtagtcactggtaataagacattatagattcaaatgagatgctgtcttggtcaggacgtggtgtcctccacggcagaagggaagaggctgcctgagcacagattgtcttgagtatcgtgcatagatggtagagatcagacgccacagacagccgtgggctgtccctttaagaactcccatagaatgggcagagatgtcctagaattggacaataaggaaagagtacaaggaaggaaaaataaaatctagccaagctcaaggacctgtatgtgttacctcaggttaaccagacgtttctcagaagacagaatctaaatttctacttacattgcttttgtttttattatcatttttgtgaataataccaaaattaatgtagactaagtacttatatgggcaggcactgtgcttagtgctatgatatttctatttatttatgaatattatactcatatatttatagtgatttatactacttgtttcagtatgcatcaagaaatggaaggcacagatatcttgacagagataatttaatataagaaattaaacaggtattgggtgactaaaaaggcaaaaggggacattgaggtaacatagaaatggtaacaggtaacacagaccagtttttacccctactgttgggagaacaaaagaggaagtggggttattagaatctaggggcttggaggaagggcgctgcatggccccaagaggtgtgatgagattggttttgagtgtgctcgaacagactggaaatggaaccaaataccgttaccagagtgaagaggcattgctggagccatgcattcaggagagagcaaatcccttctcctgactttttgtctaagtgcctcctataggaaaaatctgcaaggaatccgatctcaaaggaaaaaagtagctccccaagtcccgtctccagcatcacaaagcagcatatacaaggatgggtctgaagctgaaacagcttactaactggcacattattctatttatattatgacctattcctcttcctagtccagtaaggtagatatgactattcctaatttacagatggagagactgagttttagtaggatttggtattttcctccaagttccgtggatggcaagtggagaggctgggatgctcatctggtctgcctgacatctctgtctgactctgaagcctaggacaagctgcctctacataggctactaggagccactgagatggctacaggtttatactggaaattcacaaaaataagagaattttagaaatagaggtgctcttcgatatcttccatcctatatcttaccttataaagttacagaaattttgagttactgaagcatgttcagggtcttatagttgttaagaggctcctaatctagtgttctcttcatgtcctgtattccgcccgtaattttcctgttgtaatttccagcaacattctcactgactgctcctggaacatttactgactctgtttcatgatatatctatttcacaaggggaaatggagttgaagcatttgggccccattttaatctttcataataatcttgtaattcccaaatcagcttctcaaatagaatgagagctttcatgtttttttttcctaaattctttttgtatcatttaaatattatgctttattaaaatattcataatggaaaatcatactttgaaaattgttattattaattttgctttggttggttagcaaagttctatctttagtttttaaaattaatttatttttgaaatagacaataaaaatcgtatatttgcatgagttctttgcttgatcctctgaacaatgacttcatagaggtgctcactctgtattgtcagatgatctaagtatacaacccagtatacaacccagtattccatctatcatggcaccatggaggaaatcattgacaaaatgtttttaaactccttaaaaattcataatcctgacttttgcaaagcccaggggtgccaaagcaggcatccctgggcttttgaaaaatgccattatttaagctagagccgttatctaggctatcattatctaggtagagtttggggtgtgtgtgacctcaatatgaaaacatttggatccactctcttggatccaaagagatggcatctggaggctgtctctcaaaggagatctgagcagcacacccagcaacaggatcagctgaccttggacagactatatagaggtaagttattccacatagaggcaggtgaacagaagcagaatagatttaagatctgcacttacagaataatgtaagataaacacaagcatgatctcttatggtacaggagcctattggatgggaaggatcagaaaatctttggggtaaggtaggggaggttgtgaggaactaccaatctgtagagcttcatctgggaaccttggaacctcctctccatacccatgaaagcgcagtgctctgtgacttagatgtatatatcacaactcatccaaattctcttcagttaatagtagacaaacaccatacacaacatgcatgatcagctagtctcagggcttttcaaagtcagaatttaccatttatgaaacactgtatttttaaaatattcttattgagtgcataatgatacatcttactgatggtgctggaaatctgttttattaaaatagtaagaaacagagagattattatgtatgcaatgaatcaaataagcagaaattgtatcatgtaaattaatagaagcagaagaatgagtttaagtcagtaggaagaggatgtctttgttggcaagatacctggagagacaagggtgatatagaaatgataaagaagaaaaggctacacagttttaatattcttgtgaggagaaagaaggaggaactaaagtggaatttggaaggagcttcagctgatatcagacagtgagatcatatgggtaaaggtttaagttgtgagtaaagggaaatgcattctgcttttcaccttgagagcatcttgtacattgctgatggataaatggtatgtctactttgcctccccttttctgctgattatcatagatgtgggagatagaagatatcctacaatgggcaggagaggagacttaacacctattatgtgttaagtaggtacatacattaaattttatcctcataacaactgtttaagatggaatatatcatcccagattattccttctgccctgcctgcctcacatcccatcttggaggtttgtccttaaaggagacaggttagacacatatagaatgttaataaaaaggagataagttctttaatcaacatcaacaactcttttcagtaataatgttccaaagtaaaggtgtcttctctcaaacatatctcagttctcttaagttccttcatctcttattgcactggacacaggtagaggagatattttgtgattcacacgtggaataacacatcttttgttttagaactatttcagtggttcgaatgcatctttatttgaaaaggtgaatcattttaggtttcctgaggtgtagacatcaaaattatgttacatgcaggagatattgggggagggaggcgtgtgaaggataaaggagagagtgaacaagagtagacaggaagagcttttagatggtaatgcaggccctatacctgtgaaaggagagagaaaaggaaggatttaggaagagtctcagattgtactacagttttgaaagagtcttggccaggctaacggtgagtctctaaacaaagtatgtccattagataaattccatattggttagcaataacccagctccagtatttcccatcatgctcagtcattatctaggtagtggttggggtttgtgtgacctcaatgtgaaaacagtttggtccactctggtgggtccaaggaggtggcatctggaggctctctctcaaaggagagctgagcagcacgcccagctgctaccttgaaaatgtgactgggctcctccactttagatcatagctgttcatattgctgttgttgctgttatttagtttcaacaggtttcaaatgcagccagaatgacctgtttcccacatccatcgtctgggcctacctccgtgctgggtcagcagaggctgaacttctagatcatgaataattcttcggtggcatgaccccaagcgagactgctaagcctcttgtggacaaatttagagttataaattttcaaatccacctagagatacgtctctttccctagtagcagagatcataactttggagggggtgaggaccctctcatctgtggatgtagtgagattcctccaatggctttgctgagcagggtgggctgctgctcaggcatgtaacgctgggactggcagtatcaaagggctctgtcccttatttacttcacttcctcaatgtccagtgtgggtctctttggttcaacaggcttattaagtttgattaaaagaagatgcatttcatgttctattctaggtcctagatcacttcttttgctttgtaagcttcttaatttgctactcctgagtgactttatgacacagctctagcttgtgacgagagagattcctgggtctgcttttagcttccttggtattttaaacttggggaactgatttcttaaggtctgaagtcctagcgatgccttttttttttttttttttttttgctttagtaacacattttagttttcatcacctccctcaggctacacttggccaaaccaaaagtgagcttttcttttgcaaatattagggatgcatatgatcctaatgctatacttacaatatgaaaacagcattccttctttggaagtgaccatagaaatgagtcttcttttcattaacatagtaaacatttgttgggcatttgccaggtgccaggcattaagcaaagatgagaaaacccaaggtctctgtcctcaggaacataaagtccgagggagtagtcaaataatcacaaaaataaatccaactgtaattgtgccaagtgctatgaaggaaagctatatagtgttaagagaacttatagaagacaacctgatgtggtttaggagctaaaggaaggagacagataaaagaaaatatttttctctgagaaagtaatgttcaaattgggctctaaggagtcaggacaacctctgaatttgaaagaagggagagatattctcagcagtaagaacatcaattacagagaacgtgtgatgataagaggtggccttattcaggggactgagtaaaacgagagagctcagaatgtgaagggacatcagaacacaaggcattggagagacagaagggaaccaaagcacgtgggatcctctaaaatctagactgcactaattattttttttttttctcagagcaattaaaagtaacttaagtggggggtaggtgggtagtaacatatcagacttggattttgaggtaatcaacagactgtagacgggcaagatggctgtgaggagatcaaggaagaatctttcgatatgactaggttagagactaaggttggaagagctaaatttacctggcaggaattttctatatctaaatattggctgccaaactaatagattaaaggatgagccattgagttaggttagaacttcacaatgcattaaattatagtcaataatttaaacacatagcaccaaatcataaatctaatacatctgtggtgacaagtagattatgtaaatctacattcatttttttccaagtagctgcaatatattctttacattttaaattattttatttgttcaaaaactcctttttaaatacataataccaaggcatctcccagtataggctgtgtccagatgaccacacacgtctcgtttcatgtatgaattcacaaagcttcactctgaatattttaaagaaccagcagcaaatttataactccagaagtcaaccagccaacaaaaccctctaatatgcttttaatctcctccttgcgaaatgaaagaagacaacttttttttctttgtggaaagaaattatacataaaagctcattttatagcactgagactgtctcattttgttaagagttttatgcaattagacagtaggaaaaattaaagagtttttccagtttcagtgtctctcagacacttctttggtgttttgattcattaaatcccaacataagattattattgccacgttactgtcttggatgatttactctattttattaaaatgggtagcagagagcagaagaataaaaaaagttggtgtacatgacaatttaaaggagcttattctaactgaggattgctaatgattaccagaagcaatttttttttgttcattcaatcactccacaaatataaattgaagtcagatgttgggaatacaaagacaactaacatatattccctgcccacagggacattatgatctaattggatatgcaaacaaacaattgccatgcaaaatgacaatctgaggctgatgtacatatgtcttaggcacttgggaacataatggaataagggttcagtgtccgggttaactggcattcagatactggactcttgagagagcccagtaaagagaacctctatttcccatgtgagttctgaataatttgtttaaaaagaagaggcagatgggcaaaaaatttttccacattcattattaatggaaatcgaattggaggaacaatccggaattcttagccaaatggtcttgctgatttagaaccccaaattagccattttacctctagggcaacttatttcctagaagaagaaagatatgtttgggctgggccagcccagttaattctttcccagtttaccaacagaaatcactatgcctttcctggtgtgcagtgagtatagggacagagaaaagctgaggcatattgcatcaagtgaagctccgtgcctctgaaggaaatgctgagagaaaggaaggggcattcattacccctatcacaactggctgtggttgagaggtcaacaaaggctttacaagtatcttgaaccagctttaaagaaagagtaggaatagagcaggctctagaatggggcaggcaattgggaagcgaattccaagcagagagatcggcatgcacaaaggcatggaggcatgagatagtgctatgctctcaacacccaagagtgattcagcaaagttcatatttagggagaaaggagggcagcaagaggtgagcctgtcatactaaaaaaaaaaaaaaaaattcaaaaaagagcctgatcagggagagaatttcattatgctcaagtcagactttatcctataggcagcggagcgcacctgagataggaggaaggagcaggtttggggaattttcttgaatgtgctatgttcatgcttcctatgagacatgcaagtggagtgagatgtgtaatggcattgggcatagggtctagaattcccactgttagtgtcagtcgtgggccatggcacaaaaggcaaatggaagtactttctatagaagccagaagagttaaaaatgcagtgtagcataatgacaaaaactaggcatgagattccaacaaacctgggtttgaatcctgccacatacgacctatgagatattagacaatcatcctgaaccttgtagttgccatgtataaaacagcagtattaatacctagctaccaggcttgtataaaaaatacatgagattatgtgtgtaaagtattagcacatctcggctgggcgtggtggctcacacctgtaatcccagcactttgggaggccgaggtgggtggatcacaaggtcaggagatcgagaccatcctggctaacatggtgaaaccccgtctctactaaaaatacaaaaaattagctgggcgtggtggcgggtgcctgtagtcccagctactcgggaggctgagtcagaagaatggcatgaacccaggaggcggagcttgcagtgagccgaaattgcgccactgcactccagcctgggtgacacggtgagactctgtctcaaaaaaaaaaaaaaaaaagtattagcatggctctggcacatagtagattcttctttaaatgcctcttcaggatacttagctcatgaaaattcccatttgttggagggacaaggaaacagaaggaaggaacttgtagccagagcaagaaagtggaagtggggcagcagccatgtcccctgtgtaggcaggaggcagggggacaagagtaccaatgcaaggatggagggatggatacccaaaggaactgcctcattcacagctgcttgaggggcagagatcactgtctacagtccttaacacaacttgattccctctgctgaaaattagatctgcctaggctcagctcagcttcctctttgtactccacactgtctctgttaagaaccatagagcacctgtttcatgtctatgaatctgggttggagcaaaaggaaaataaaataaaaaaaactcagagatgagcaaagtattaggcagaagcctaatgggtctggctggagaggaggagtgtggccatgcgctgctgtcagcatgcagctcacaaggcccgggctggctgctgttcttgtgacgttagttgaggtttattctgggcataattagccttttcactccttgtttctttcctgtgttgcgtcctactccatgaaatgttgagtgccagtccttgtctttcatccacacttgaaaccttcgttcatgctaaggtgtaaataaccagcaacaactcagagaaaagtagaaatacacccagacttgaatcttgcagtgtcacctcccctcacataccctcagcagatatgcttaaaaaattatatcttcctttcctaccagttttactttatacattctttcaaaataatggtctggcagctattacaaattaaaaagagttactaagaatgaagaaattcaatgatcatcctggggatagagtgttatctttcatggtgaacatttcttggtaatcatgagaaacaccaaagggatgcagttttaatataatttcaggcaacaaataattatgaaggagatgttttgcatgcagagccttttggggacctctgaaatcctgtctcctaatccatctatgtatattgggcaaatagtaagttctcaataagtgttagttagaaaagtaaatgcatgaattgagtcctggtaaccataataaaaacagtctttcttgtggaaatgtgttggtgattatggactggaccagctgcagcaatcaaacagaaattagagtcttaatagacaacacacgagcatggcaccccagagttggacagaaattttctgtgctcactgggaacttggctctgactctggtttctctgtcacagattttggggtgggagagtgctcccatggggaaagcagcacgtgctgatatcgaaattgaatagaaccttggctgggctaggagtcattgctattttagtcacttccagatgtctgctgctgtagttttaagggacagggaaagatgagtggagtgtggcatgccactgggtaaaagatgaggagcgttctccttctaagcccttcaagttgtatttaaagccatccctcaatatgctacaaagatggattggataaagcctttaaaaactgtgttcttctattcacaatagcaaagacttggaaccaacccaaatgcccatcaatgatagactggataaagaaaatgtggcacatatacaccatggcatactatgtagccataaaaaaggatgggttcatgtcctttgcagggacatggatgaagctggaaaccatcattctcagcaaactaacacaggaacagaaaaccaaacaccacatgttctcactcataagtgggagttgaacaatgagaacgcatggacacaaggaagggaacatcacacactggggcctgttggggggttgggggctaggggagggatagcattagaaggaatacctaatgtagtgacaggttgatgggtgcagcaaaccaccatggcatatgtatacctatgtaacaaacctgcacattctgcacatgtaccccagaacttaaagtataataaaaagttaattaattaaaaataaataaacaaaaactgtgctttttaacattcatttatagatttgacttcatatatatcaaataggcaaactgcagaaacctttgtgaactaatcatgactctgcctgccccaactagaaaaacaaaacaacacaaaacaaaacaaaaccagaaccattcttgggctttggttatgatctagtatttatgaagtgccagccattaaacatatgttgaatggtacctatgccagatgagctggctgcccccagtagctattgtgctaacctaacaagctcaccagatgcttgttctatatctgctttctccttttatgatattttcggtgtgtcttttaatcccaaaattgtcattatgaattagataaaagatatcaggtggggggtgaccccctctgaaatattctcaaaagggatgcctggggttctttccaagaggccctgtcaccaccagggaccagtctagggtatagatcaaagtctgtgatgggttcatagagtttcttgtttctttcctttctttcactgagaaggtatggcactagcatgatataactcttgctggataaagaaagcacaggagaagcagtatagtgcagtggttaagcatataggatttggattagactcaggtcaagttcagacactgtcactcattagtcatgtgaacttggacaaattacttaacctctctaaggctcagtttcttcatctgtaaaataggtatagtgatagcagctattgaatttttgtgtgtgcaggagaggggaaaattatggtaaataataattcctcccttgtccaacaagattgtgagctcaccggaaatataacaaagggtaagaccagtgaaggtcaacatgccgcctttattattgttaaagctgacataaaagaatgtagtgtctttatggacaagtgaacttcacagccagacctctctgccaggacaggcctctccttgcaggagcagagcacagcatgttccctctcaagagaaggaagagatgtccgcatgtctccatccatgctctactgtcaaatcagtcacttttccccgaggctagagtgaggcagtggagggtggctgggagtgttatgttaatgggtcttcacttggaagggaacgtcaagagttggagatacgattaccctagtagcagcaacttcatagtgttctcctgaggattctgtgagataaaataaggtgtttggcaagtgctaaatgttcacgaaatgtatacggtgatgttacttgtcacagcaaccattatcactgagtgtcacatctgtggcaaggaaatagggcaatgaaaaacagagacatttggaagttgtggtgttgtcccatgagggttaaataaagagttcaggatataatctttaaaccaaacaagagattaagtgtctatacttagcatgttctgttattgtcaccctgggacagaggaacaagcatgaaggtttaagacatgatagaaggagattggatttaacacaagtgggaagaagcagagatcttaactagataaatgtgaaacaagaagatgtcatgcacctgggagctgggagatcctcccaagcatattctcctgggatgaagatttctgggtcttggggagttggtcaatccatgtcttatcttagacatgagattagctcacccactccctctgcttgaggtttctactagctgtttatccccaaatgttctgttggatggcatcctagtcagggttctccagagaaatataaccagtagaagatatgtatacacacatacacacatatacatatatatatatataaaatttattatatcaatctagtatttatataataaatttattttgatttatcattattattacttaaatttattatataaatctttatatatatatatatgcatataaaatttgttgggtttttttttttttttttgagacggggtctcactttgtcacctaggctgcagtgcaatggtgtgatcttgggacactgcaacctccacctcctgggttctagcaattctcctgcctcagcctcccaaagtgctagaattacaggtgtgagtcaccatgtctggctgatatatataatttataagttaatataaataatagatttactacagatataaaaggagattcattttgaggaataggctcacacaaccatggaggctgagaaatcttctaacctgacatctgcaagctggagatccagagaaaccagtgctgtaattcagtctgaatctgaaggcctgagaaccaggggagccaatggtgtgaatcccactctgagggcaggaggagatgagatgtcccagctcaagcagtgagtgaggcaggagaaaaaggagcaaatccctccttcttccttttgttcttcctctttttgtcctcagtggattaaatgatgtccagccatgctggggagggcaatctactttactgagtccacctatttaactgctcatcttatccagggacaccctcccgggcatacccagaaacagtgtttgatatggacaccccatggcccactcaagttggcacatacaattaaacatcacaagttggctttattttttcttaaactgaaaaatgcagatacaggcctgtgtggcccagggaaacccagacctttggtatttacctgtgattcattccgtgcagtcccgagttaagcacacaagttcctctgagattatttggagattttattttgttctagttcttaaagagtacaatatttaagaaaatttgccccatattttgaaagcaatagtttttcagatctctgttggcctctgatttgagttaggcatgatgtttgtttaaggcaattttctaaattacttctcttaattcttcctctaggaattagcatctacgacatttctactttcttttccacacctccactctcccccacttcacttcccttcttcagctgtgagtgtcaaagtccctgggttcgtataaatgatgtcaaaggcaaccaattgggttttctaagattcagggttgactcacctgatctcaagaggaagccccatattgacaagtgattatcttctcatttcacaaaacatagttattgtcagagagaagtaagaggggagctggggagtggatagctgtagtgatacagtaacagtgcttcaatgctgaaagtgaaaaacacagtgaatgtgaggaagagaaaaggtgcatattataaaggaagcagcatcagaatatgccaatgttctgagaataaagagggagttattcaggtggctttgagagagggtgatttcaaccctggcagataatttttaggaacgagaatctaatgcacaagtaaacatgcttgttatatgggaatgctgtgatagtcttgatgaatgggaagtgtgcagatgagttccaatgtcatcccacctgctctttgatatttgtgaagtgagagctgagacataacctctgtggtttaagaagaactgatctaattatggtcaggtgattggaaatggaaatctgccacagcactttgaggaagcatttttcagatccccatcccctagtattaagcaaactcttaaaatcgtaaatctaatgataccacgaaatgtgttttgatgtttaaatcaaagggcatttcacggtaatggctccacagctgagcaagcctgtatttgcttaaaaattttatctatttagaagtcactgattttcaaataaactgaaaagctgccaatcaacatggcagctgaaacattcactttatggagcaaaacaatagggctcatgtcagagctgtgacccaagtttgaaaattaatgtcattttgttatttctcttaagagttgatcttttcctttgagttgctcttcacgacaactgctaagtggctttgttgttggatttcagggtttggcacaatattccgttctcttttatggctattatgacaataaacgaacaattggatggatgaatttcaggttgccgctctcctattttctagtggggattatgtgcattggatacagctttctggttgtcctcaaagcgtaagtttcatttgtcttttgggaagcaaataatgatttctggaatcaaatggagggattaatttggggattggatataattttgttgctattttatgtctaaaggaaacagagtctgtaagagatgaaatgtagttttaataccaacactaatgttagactattacatcttcaaaagaactgaacataaacacaggcctttgagtcatctcatggggtcagaccaatgcttgcatgcctatcttgtgtttaaacatattttttaaatgtgtatttttgtacttgaaggtgtgaattaatgttgccagcaagacaggaaaacagctgctggtctctcttttgcgtgcagagaggtttgtaacttgcagaatcagctcaataggcagaatctattgttctctgctcattttttaaaaaaaccagaataatcactcattcaaaaaattttagctgtgtaagacagcaaaaatgaatggtccccaatgaaaccatcacaatcaactgtataatcatggtttgtcttgggaaaagatttattggagtatggggaagaatttcactggagaactgatattactgcagttcatttttctccctgcctaaaattatttataatactccacttaaagactgcagaagcctagcagagttatttgggtttatatattaaaaaaatgaccctttagccaattttttttgaactagtttacgagaagagttgaaacatctcaagtaaggttgccattcttttatttgactatgtgcaagttgaatgagcttttcccctcattgtaggaggtccctcagcctgagggtctaagaggggaaaagtgcaaagtcaccctaagcaggagctctctgaagcagtctgtgacacactttgtgtcctaaacctgcctcacttacttgttcctccagagaaaactgccatatttcatttttaagctcttttaggacttaaaaccttataggaaatcctatatctaagatatttatcaacctgctaaagtgtaatcagagacctcaaatataagagactgtccatcagataaactactatcacattccaaaaatcgaagatattttctagtcttttgactatattgctctggttgggctgaagtcagaggtatcatttacattactgaggcctcatgagtatcatttctgtgttgctcctttagtttctgtggtcagtggagaagaatagtttctcatgtctgatgactcagcttttattccggtaactgtgcaggctgtgtaccccacagccattctgcctaggttcaaatcccagctctaccatgtatgtatttatacaatcattaacagatggctcaactgctttgttctcctgtttccccttggtaatagaggtgtaatggatgtgaggactaaatgaattaatacaaacaaagcacttagaatatgcctggatgagaaaattattcaacaaatgttaacaattttattaggctatattttattaggctatattatattttattagcctataattcataggcttatttaagaaaaaaagccagcatggtaggagttgaggccacattatagatccccaaaacaaggcagtcatgtatggttatgcagttgtacatcagtagatttgtatatttaataaatgattttctggcagatgaatttaaagtatctagagcagcattgtgccaggcaagccacatatataagtttaaaacttctagtagtcattaaataaatagacaggtacatttaattttaataataaatatatttgctttaactcaatatatcaaaagtattatcattttaacgaacaatcaatataaaattattattgagatattctctgcctttcgaaaggtatcaagtctttgaaatctggtgtgtattttataccagtcgcatttcaattgttcagtagccagatgttgctggtggaacactctgttgggtagagtggctctagaggaagtagtggctttttcaaagttgctcgaagatgccatttgggatagctgcagggcatcaaatccacattttccccctcaaagtcattcatgttatatcatccaaaccagtgtggccttgaaccttccctctggcatggacctttggctgctccttacctggttaacaagtagttcaaactcattgcccaaacagcaagacaactcaaaaacaatacaccactctcactccaccaccagcccatgggagaatattcagtagaaaaagaattgatgagatataaatctttgtacagaatcattaatcatctcttcctactcctatcccagtcaaatattctcttggaataagtttgagcggatttatgacatacattactcaaatggaatagaaggtaacctaagttctaaaatcgactaggctacatcaagattttttcactgtactcattctgttagcgtctgcatactcatccacaaaatgggagcaaatatctatttttagttacttaatagcaaaatcagaaaataaaaagatagaaatccaagaaaatagtttgaaattttaagataagatgactaactttgttggcccaggattctcctggttttagaactgaaagtcttgcatttgagaacctttcagtccccaacaaacatggatggttggtcaccttggttttaagtccttcccttttcttcttcctcccttcattcatttcttttatcctttttttttttccttttctttccaggtcagtgtacattttcaaccacatcatatgcttagaaatcttcatgataaatatagttacataagtattaaaagcaaattaaaacagtataacataaagttacacaacatggaaaccatcagctcatttaaatattgtcctcattagtttgaagttttatatcataaaataaaggtggcttgacatcagaacccaactgttcccgttaaaaacaattctctaagctaaaaatttggggttttactggtctattttacagcagctaaactactggaagcagttgaatcattttgagaatgcatgtcttaataagaaactcatagctattttatccttgtaggctttttcaagactttttcctgtttgtaggatgttttagtccatttcgtgttgctataaaggaatacctgaggcttggtaatttgtaaagaaaagaggtttatttggctcacagtctacagactgtacaagaagcatggagtcagcttctgcatcaagtgagtgattcagctgtttccactcctggtggaaggcaaaggggaaccagcatgtgcagagatcacgatggtgagataggaagcaaaagagagatggggaggtgctgggctcttttaaacagccagctctcgtgggagctaatagaataagaactcacttactatcccctgcaaaagaaggcattaatctgttcataaagaatcttcccctatgacccaaacacctttcattaggctctacctccaacattgagatcaaatctctacatgacatttggggagacaaacagcgaaaactcagcacagggctccctgggattagatataatttttctgtttatgatcctggctataataatactcatagaatggactaacaaatattcttggatacttaaatcatgtgctatacgtaacccttaaatggtgtcaaaatttttgtctacatagactataatatagattatatatatatgagatatatattataaactacatatatcacaaaccaacctcaacacatgcagataaatatttttaaatttggcaaaatgacagtatgttcatccatatttctggagctgcaacaataattataaattatacttgaaataataataattaacatctgttgagcatctctcatgaatcagtttaaattacattacttctaatccctaaacattgcaaagtagctattagttttataattttacagataatgaaataaaactcagagatcctaaatgaactgcacaaggtcatttgactataagacctctttgaatttagagttttctagttcaaaagatatcttctaccccttacaccttgccacctctctgtactgtgcttctccttacgtaggccaaggtgttcctcccaccaatcttatatactgtgttgagtacccattagttattcctattggatggatggagaaattaaggctcagcagagtttgaggatttcactaagttcaaatgcccagtaatttgcataactgaactttgaacaccttgctttaatttcagcacttagcttttctaatttctgatgtggattcatctatattgatgataacaatcatcaatatagactgatgtctctgtctcgtcctgggtagcctttttatttttaaaaattctgtattaaaatagtttcttgtctgttgttaaattcccttagagttttatggccttgatgtgactcatgtgaccaaacgttttgttaaaaaaaaaattaaacttatcaaaaccaagtccttgttctacaagactcttgcatattccaagataaatcatggccagcttcacacacaccatttctaaatcaacgagactttattttcttccttctacttagatgtcagtgcctttgtccattttcttttcacttctttggtacatgtttacccagacagttatgacctacctgatactctgcctaaatatcttccatgtctcttgacatccttaatttcttaacattgaaattgtttctttttcctccccattttcccacccccaattaatttttttctttgtcgaaggaatttctccttatctatttagtagaaagcagtcagagtgcctcatagaccccagtctaatattttacttctcagagatattttcattggagatcataatgtttgatgtatgtaatgatgaatttcagaccctagagaaagttatggaagggtaagtggacctggcctacagggcatgatattctggcaaatcccacaaaacatatggttatctcatcttcctcaaactatagttgaccttatttcaaaaatgcttggagcagaaaagcaacgaggtatgaaagacatgaagtcaccaccttccattttatattactactctatgaattgcatctagattttaaaactcaacataaaaaactgtcttcttgcaagcatggactaataaggatagtagtagttcacaaagaatggcagctatttacaaagtgaggtgatattgtcaaaacctatcataatgacaaagacagaactaaacagtgatagaataacaagcatatgtggtatgcatttattatatgtattgtgccatgcaaaaaagcaatttatgctgtatgtatttacttggtgaggctctttccagtgctaagtttacttctagaatgacaattcatgtattcattcatttgattactatttgtggaacacctagaatgggtaatctaagagaactatccagtacctgggtatttcatggtgagcaaaataaagtccttgcctctgtggtgctcagttggggaaatattgtaaacaaagaaatgaccagtggttttggccaatgtagtataattttatgttgttgttatcctctgcagtcaaatatttgctacagcttcttcatcctcaagaattttaaatagttgagaagagccaagatggctaacaagatgcagccaggaagagcttctcccaatgagaaaccagggtattaagaagattggcacactccaagtagatcttcagaagggaggcattgagagtggatggaggaaggatgtagactctgtgctgaagttagaggaagcttggaatgctatgctcaggaatgagttctaggactcattcctggctccgagtgtctcctaaggaagggagagttaaataggcgtggagtagcccactctcaccatggacctccataattctagctgcaggagtctcaatgacccccatggatatttgaactgatagggggagctgcttgaagagttgacagggacaggactgcagactgtgtggagttcagaggatttggcaaaggaaggactgcagtagagcacagccaaggacacccatccctgaagactcaccatgcccctgtaggctttggcctttgttgactgtcagaccaatacagagcagggctgtcttgcccatggaatgaggccattctgatctgagtgcctcccttgtctgccagcctttcctgaggttcatgccaggctgtgcccacttgcagcacaggcttggatgtccaactggggcacttcctaaaggccatcatcatagcttctttgttggcagaccccacccaactgttggagagcttctgaagacaagcctccacccgcacacaaccacctgcagcctcccccctctgctttgccaacacgcaggtatgcatggaccctgctgctctgctgccaccaacacatgagcacagaccccactgccactgccccgacaaagcactgttgccagcaaccctcatggagcattgttgttaacagactggaaacacctcagctccttcagcacagcaggtgtttaaccttgagaggccagagaacaaagctgtgtgcctggtcctataccactgggttacagcacacagtccaggagtgctgagctgagcccaggtcccctgaaatcagccagaaatgaagccagttgactagacctaacttatatcacagtcaaaacctcaaaggcatcaaagaattgcaactttaaagattaaagaaacatcagctcacacagatgagaaaaaaccagcaaaagaactggggcaactcaaaaagccggagtgtgttctcacttccaaatgaccatgctagctccccagcaatggttcttaatcagactgagatggctgaaatgacagacatagaattcagagtctggatggcaatgaagattgttgagatttagtaggaagttaaaacccaatacgatgaacctaagaatccagtaaaacaatacaagagctgaaagacaaaatagtcattttaagaaccaagctgatctgatagagctgaaaaccccattacaataatttcataatacaattggaagtatcaggagcagaacagcccaagctgaggaaagaatctcagagctcaaaagtggttcttcaaattgactcagtcagacaagaataaaaaagaaagaataaaaaggaatgaacaaagcctccaagaaatacagaattatgtaaaaagaccaatcctatgactcactgacatccctgaaagagagggggagagagaaagcaagttagacaacatatttgagggtactgcctatgaaaatttccccatcctcactagagaggtcaacattcagattcagaaaattcagagaacccctgcaagatcctataaaagatgaccatccccaagacacatagcccacagattctttaaggtcaatgcaaaagaaaaaatattaaaggcagctggagagaagggaaagacatctataaaaagaacccatcacactaatggcagacctttcagcagaagcagtacaaccaagaagagattagggcctatattcaccatcctaaaagaaaagaaatttcaactaagaatttcatatcgagcctaactaagcttcataagcaaaggagaaataaaatccttttcagacatgcaaatgctaaaggaattcattactatcacacttgccttacaagaggtccttaaggaagtgctaacatggaaataaaaaactgttaccaactaccacaaaaacacacataagtacatagaccactgacactataaagcaactacacaatcaagtccacataacaaccaactaacaacactatgacaggatcaaatcttcacatatgaatattaaccttaaatgtaaacgggctaaatgccacattcaaaaggcacagaatggcaagttggatcaagaagcaagaaccaactgtatgttgtcttcaagggacccatctcacatgcagtgacacccacaggctcaaaataaagagattgataaaaatccatcaagccataaagagattgataaaaatctatcaagccataaagaaattgataaaaatctatcaagcaaacagaaaacaaaaagagaagagcctgttatttttattttaaaccaaacagactttaacctaacaataatcaaaaagggacaaagaagaggattacataaagataaaagattcaattcagcaagaagacttaactgtcctaaatgtatatgtacccaacactggaacacccaggttcataaaataagttcttgacccacaaaaagacttagataactacacaataatagcaagagagttctgcaccttactgacagtattagacagattattgaggcagaaaactaacaaaggtatttgggacctgaactcaacacatgaccaaatggacctaacagacatctacagaacactccacccaacaacaacagaatatacattcttcttatctgcaaatgacacaaactataaaatcaaccacatgctcactcataaagcaattctcagcaaattaagaaaaactgaagtcacaccaacaacattcttggatcacagtgcaataaaaatagaaatcaataccaagaggatctctaaaaatcacatgattacatggaaattaaatagcctgctcctgaatgacttttgggtaaacaatgaaattaaggcaaaaattaagaaattatttgaaactagtgagaacaaagacatgacataccagaatctttgggacccagttaaagcagtttaaaagggaagttatagcactaaacacccacatcaaaaagttagaaagatctcaaattaacaacttaacatcacatgtagagaaaccagagaaacaagagcacaccaaccccaaagctagcagaagataagaaataaccaaaatcagacctgaactgaatgaaattgagacacaaaaagccatacaaaaggtacataaatccaagagttgtctatttgaaagtataaataagattgatagaccactagctagattaataaagaaaaaagaagattcaaataaacacaatcagaaatgacaaaagggacattaccaacaactcaaaagaaacacaaaaaaccctcagagattattacaaacacctctatgcacacaaactagaacacttagaagaaatggataaattcctgaaaacatataacctcccaagattgaaccaggaagaaattgaaaccctgaacagaccaataacaaattctagaattgaatcagtaataaaaagcctatcaaccagaaaaagtcctggaccagacaaattcacagccaaattctaccagatgtataaagaagagttggtgccaatcctactgaaactatttcaaaaacttgaggaggagggatgcctctttaactcattccatgagaccagcatcattctgataccaaatcctggcagagacacaatgagaaaataaaacttcaggccaatatccttgataaacatacatgcaaaaatcctcaacaaaataatagcaaaccaaatccaccagcactcccaaaagtaatttaccatgatcaagtaggctttattcctgggatgcaaggttggttcaacatacacaaataaataaatgtgatttatcacataaacagaatgaaaaacagaaactacgtgatcatctcaatagacgcagaaaaggctttggataaaattcaacatcctttcatgttaaaaactctgaacaaactaggcattgaaggaacatacctcaaaataatgagccatctatgttaaactcacagccaacatcatactgaacaggcaaaagctggaagcattatccttgagaactggaacaagacaaggatacccaccctcactattcttattcaacatagtacgggaagtcctagccagagcaattaggcaagagaaagaaataaaaggcacgcaaataggaagagaggaagtcaaactatctctctttgtggacaatataattctaaacctagaaaaccacatagtctctgcccaaaggttcctagatctgataaataacttctgcaaagtttcagaataaaaaaccaatgtacatttctatacagcaatattgtccaagccaaaccaggaatgcaatttcattcataatagccacaaaaagaatataatatctaggaatatagctaaccagggaggtgaaagatctctacaatgagaattacagaacatagcttaaagaaatcagaaatgacacaaacaaatggaaaaattccatgctcatagatgggaagaattaatattgttaaaatggccatattacccaaaacactttacagattcaatgctattcctatcaaaatacaaataacagtttttagagttagaagaaactatttaacattcatatggaacccaaacaccctgaatatccaaagctatcacaagctaaaaattaaaaaaaatttaaaaagctggaggcatcagaatcacactacctgacttcagactatgctacaaggctacagtaactaaaatctcatgatactgatagaaaaacaggcacatagaccgtattagtcagggctctctagagagacagaactaataggagatatatatatatatatgggagcttattagggagaaaggctcacatgatcacaaggtgaagtttcgtgttaggccgtctgcaagctgaggaaggaagaagccaagagtggctcagtctgagtccaaaagcctctaaaacagggaaaccgacagtgtagccttcaatctgtggctgaaggcctgagagcccctggcaaaccactggtgtaagtcccagagtccagatgctgaagaacctggagtctgatatccaagagcaggaggatgaaaggaagcatctagtacagcaaaaagatgaaagccagaagactcagcaagccagcttaccccactttcttccacctcctttgttttagccactgtggcagctgattagatgatgcccacccacattaagggtgggtcttcccctcccagtccactgactcaactgtcagtctcctctggcaacaccttcacagacacaccaagaaacaatattttaccagctatctaggcatccttcaatccaatcaagttgacacctaatattaaccaccacatagaccaatggaataagttagagaatctagaaataaagctgcacatgtacaagaacctgatttttgacaaagttaacaaaaacaagcaatggggaaaggactccctgggtcatacacagcattggaataactggatagccctatccagaagatcaaagctggactctttcctttcaccagatacaaaaatcaactcaaggtgggttaaagacttaaatgtaaaatcgaaaactataaatttttagtttttaaaactaatctataaaaactcttgaagaaatcctaggaaatactattctggatatcggccctggcaaatccttcattaagaagactccaaaagcaattgcaataaaaaccaaaattgataggtgggacctaattaaactaaagaacttctgcacagcaaaagaatttatcaacagactaaacagacaaccaacagaatgagaaaaatatttgcaaactatgcatccaagaaaagtctaatatccagaatctataaggaacttaaactaaccagcaaaaacaaaacaaaacaaaaccctaaaaaaccattaaaatgggcaaaagacatgaacagacacttctcaaaagaaggcacacacggccattaagcatataaagaattactcaacattactaatcattagagaaatgcaaagtaaagccacaatgagatactatctcacaccagtcaaaatgactattgttaaaaacaaacaaacaaacaaacaaacaaaaaacagatgctggcatgactgtggagaaaagggaacacttagatgctgttggtgggaatgtaaattagttcagccactgtggcaagcaatttgaaaatttctcaaagaactcaaaacagaactaccatttagccaagcaatccaattactgggtaaatatcaaaggagtagaaatcattgtactataaagacacatgtactcatatgttcaccacagcactattcaaaacagcaaaaacatggcatcaacctagatgtccgtcaacagtgtactggatgaagaaaatgtagtatatatacaccatgcaatgctatgcagccataaaaaagaattaaattatgtctttgcagcaacattgatgaagctggaggccattatcctaagtgaattaatgcaggaacagaaaaccaaataacctcatattctcacttgtaaatggaagctaaacattgagtacacatggatgcaaagaagagaacaatagacaccagggcctatgtgagggtggagagtgggagcaaggtgaggattgaaaaactacctattggttactacgctcatcatctgagtaatgaaataattgatacaccaaacccccacaacatgcaatttacccatgtaagcaacctgcacatgcattccctgaacctaaaataaaaattagaaagaaaaaaataataattaaaaaaattatctgggggaaaaataatttacattagtagcaccctcttgtcttcaggggatatgttctaagacccccagtggatgcctaaaactaaggatagcaaattctattgctgtcagttggaacatgtttcttttcatgtcttcagtccacatatttaatgacttttccactttaactaaattttaatcacacactgtgaccatcacttttacagtttgaggtacaacagcaaaactatcattaatttcttttttcttcttcacaatttcatggatagaagatttgttcttactgtagatcttagcaacctcagtgtatgattttcttttccttccttattaggtcaaaaacttttgccttttcacttaaaggaagcactttaagtcttatctgtggcatatctgaattgccagcatcactgctcttgcactttgagagtattacatgaaataagggttacttgaacccaagcattgccttactgtaatagtaagtctgataactgagaggactattaacaacatgggtatactattgtatccacaggatgcatccacactaaacaaagggagaattcacatcctgggcagggtgaagtgggaaggtgaggaatttcatcacagtactcgaaacatcataaaacttaaaacatgaattgtttatttctagaattttccatttaatatttttggaaccatgaattgatcacaagtaactaaaaccatggaaaagagagaactagtccacatgttgtttagtatcgctattacagtaattttctttttcttgtgtggtcttatcctgtgggcttctagaaaattgtttcctacctgcctctcaatccccttcctcttctcaactttcattttagcagaggctacattatagtgaccctgttggtttaggatttaaagaggcatttatttgatttgttaaaaacctccacatgcacccatgaaataaccaaatgacctcagggtataaatggagctgcaaacttgtccaagtcaagaaattcagtataaaaaccttaggcaggccaggcgcggtggctcacgcctgtaatcctagcactttgggaggccgaggtgggtggatcacgaggcagaatatcgagacaatcctggctaacatggtgaaacctcgtctctactaaaaatacaaaaaattagccaggcatggtggcgggcgcctgtagtcccagctactcaggaggctgaggcaggagaatggcgtgatcccgggaggcggagcttgcattgagccgagatcgcgccactgcactctagcctgggcgacagagaagactcctcctcaaacaaaaacaaaacaaaaacaaaaacaaaacaaacaaaaagaaacaccttaggcaacaacatatatgctagaattgcctttgctaactcccctggcaaagcaaatgatgtattgagattgcttctcagataaggtggttgaaaatgatagcaatcttaaaaaatgagcagttttcataaatttgtatacattttgctctatagacaaagagtagagcttatagctatcatggccatatctcaataaaaatgtgttgcaagcaggtttgccttgggcatctttccttattcctttcagtattccacttcttttcacaccctttcccacatgttagatgttcccagtctgctcattcagttcgggctcccttccctgggaggctgtcttcagctcaaaactttgccagtgataaaactccattcaaaacttatctgccaagtggccatttttacttgaagccctgcccttggtcaatgacagtgcaaaaactggatagtggcatattaatcaaataagtcattttctccctaggttaaaccatagggaatatctgctttcaacccttttggcctccaaaaaaaaaaaaaaaagcattttgtatggcttttcatacctcatggtgtcctagcttgagcactggagcaaagtcagaaaatctgagcccttgacttatctctgtggttcactgctggataatgtccagaaaattatttcatgcctttgagcttcagcttccttatctgtaaaaaggagagtaactaccttgacttcttgctgagattttaaagagaacaaatgtgaaagcacacacaatcaccatttgcaaagggtaaagtggtagatggatgaaaggaataatgatctgtaatttttccttacatgctagcctatttaaaatgtatgagcctccatgataagtgtggctaatagtgggggaatgtagatgatctagagataccggtcaacctacaatgtcagctttatgtcattgtgcccctttcttctttggggtttatatgactataatattttaaaaaccaaaaccttatgggaccattttataatttgtgtcatatgaaattttaattttgctatttatagtgaaagggaaaaaaggaagtggagtatataggatatagatctctaaccactaaaataaacctgtgagtaaatgcattttaagctcttcatgcaaatacatatatatatatatatacacacatatatatacacacacacacatataattactgattaaaaatatatataaaatcacatatatatacatataaaaccacttggcattcaggttgtataaaaatgttgatttttattcaagaattgtagagtagatggaaatttaatgtactcaatgtaatctctatttgggatgagattctagggggaattaaaatttacataggagtttctttgcctggtttagtccatccagaggcttcagatggtctgggaaccaactaaagttgtgtggagcaatgtaaaagtcagtatatatgtttcttttcccctggggagggattcaatagatttcatcgtattcttaaagaaattcttgtcctaccaaaggttaagaactaattatctcagttaaacaaaacacataaaaatatgtttttatatacatgttgaattattcaaatcttcagtgcttagtagtttattaatcttgaaggcctagaaagtgaataatttcaacaactgaacaaaaataaaatttaaaaagaaactattttctggtcattagaacaaacttgttataaaatatatgtctttttgctattgcttctccacttcaacactcatgatcatgttttgttgctatttcccctatctcattttttctggctgctgggttaaacttcctgtttttgcagaatgaccaaaaacattggtgatgatggaggtggagatgacaacactttcaatttcagctggaaggtctttaccagctgggactacctgatcggcaatcctgaaacagcagacaacaaatttaattctatcacaatgaactttaaggtagaggcaccaacttcaaaaacctgctgtttgtatttctaagagtaaaattggaggcattccatctggtccagtagtgcagtatcttgacaatttacatgaaagattaactcatggtttctgcctaccaagatcttgccatggttctgattataactggaaaatcttccatgacccacaacagcactattattccttaaacacttctcttctctaaatctggtaataaaataatgttactggattgaaataggaccatgagtaatcagaataagatattttaaaaactagaacaatgttcactaattatttacaggaataagcataatattgaagtgaccctaaaacattattttgtagttttttttttaattcactggaatgaagatttttagagtgaagactatcctaatatcagagcaatcacagtttgtttgcaagaattcttccttctgtcttacttgccatcgtttgttggcaatattcacctggtttgtggaatctcagatttagtttacattgtcattcctcacattctgatgattgtaaaaataacttttgaggttttgatacttttaaaatgtagctaagatattctattttgggtttttgtttgtttgtttgttttcatggatacaggaagctatcacagaagaaaaagcagcccaagtagaagaaaacgtccacttgatcagattcctgaggtttctggctaacttcttcgtgtttctaacacttggagggagtggatacctcatcttttgggctgtgaagcgatcccaggaatttgcacagcaagatcctgacacccttgggtggtgggaaaaaaatgaagttcgtctctgcatgctttttatgtgcttagaacctgacatttgtttcttttgtgggttatgtttctttgatggaacatttaaaaaggccaccctttacctatcccctatcctgcccttacagttaaccaaccctgttgctcattttccattctattctagtcttatttctaaatctggactgtctgtttttcattttgtgacatgatggaaagttagagtcagaaaagatattaaaaaacacatagtctaatcattatgttttacagatgggaatgataaatctcaagagattgcattatatgtttatggtcacagagttaggagaagagtcagggtgagaacctaggaatcttgacttcgagtccaaggctcttgctgctttctctgcaaatccttcatctgtcattaaaagatcaaattgttgcctgaactttttgaagcagccatgataaagccactgattcctatgttgatctcactggaaacactcagattgcttctccacctttgggcatgtctgggcttccctctgttttcattagaagcctaactgcagcatctccatctccatttcctcctgtcctgtaccttactttctctccctctaaatgctattcaaatgaagaaggccagctcttttccaggaattaaacattatgaccgtaatttgcctttagagtatctgcccatttagtgaatcagagaaaggaggttagacatagatcatttagaatcagaaaatcattggtcatgagttgttgctagagtctgttcccgttcataaaatgcttatgtgtatgatgtgacgtcattttgagcttgggcattttcaaagtatgtgcagatttaggctgtgggaagtgtagacttcccacactgaaacttttgcagaacagtatagatcaaaagaattaaaatatgtctttataagcatagaattttctaaaaaatcttggacagcaaatgatataatctacttacagaaaaaggttccaaataacattctgagtatttcagaagtggtaccaatagagacgggactagatattttaaagactttaatatacagtcatgtcataaaaacttgtaaaatataagtaatttagcagagggcttttatttatttaaaatgaaaaatgtaggaacacctcaaagcatttactaagtttgctttcaaaatggtctcataattgtaatagtacatagaggtaacattatcatgcagctttggtccattatttatattggttatgtttttgtataaataaaccatattaaaggatgggtagttgattatcaataaaataactattctttgtaagaacctctttaacatatattttagggaccctctgagtcctaggggccaatgaaggtaataatggagattcatgagtaactttacaaatttgataaaaccaaatttaaatttgccttgcataagtttgcacaggataagccaaattttctttacattagtctaaaattatagcatgctgattttgtattatgtcatgctgagatttggatcctgttggtcatacttatataatgttttaataaaaatgacaaaaatctaatagcaattgttttctaaatatagtctggtagttattataattattcacaccacgaagtccacaggagaaaataggaaatgtttagtggtgacagtttgagccgggtatttgggaaaggagatagtcaccagagttacctaaaatcggtatttccctattagaaaattagtacatgttttggattctttttattgacttcctttagccaaataatatcatcataaggttgccaaacatccaggaaataaaaagcacatgtttcctacttttcatgtttctattccttcttctttctctctcccccctctccccacccctgcattattctcttgtctctgaaattatagcccattctttcacttttgaaacttttctacgttggcttccataacattatgtcatgtgttctccatttgtttctctgagttccttctgtttcctttaataaaactcattgtatgtgtttatgttttcggccttaaaagtttacatttgccaaaattcaatatttaggcctaggcccatctcagggaattcatccattctaactgattaaactagcccatatgctgatgattgtcagattagaattttcagtttgaacctcctcctcaagcagattattttccatttcttttggaaatcttgttgtgaagtgcatcaccatatcagaatcagttaccacatagaacaatatgtgttctctgtgtagagactgatgtaaattgccaccttcactataccaggaaacagactgttactactggcacatacacacactcagtcacatgcctctcttgagaatgtgaattgaatattttccctgtcattttattgagatcaaattctaaacgtgcataaaatagtcatttttagtcttaaaaaagatcaaagaagcctagctcagaatcttccaaaattctggcaaaaagcaataataactttaaacaccattaacctagtttctcccttgtgcctccttgtagatgaacatggttatgtccctcctagggatgttctgtccaacattgtttgacttatttgctgaattagaagactaccatcctctcatcgctttgaaatggctactgggacgcatttttgctcttcttttaggcaatttatacgtatttattcttgcattaatggatgagattaacaacaaggtaagccttgtttctggattgtccttgccataagagtgttgttcaattcccagtctcaagtttgccagaaatgcctttgaaatctctgttgtcttcattttagtttctatctctttgctttctagattgaagaggagaagctagtaaaggccaatattaccctttgggaagccaatatgatcaaggcctacaatgcatcattctctgaaaatagcactggaccacccttttttgttcaccctgcagatgtacctcgaggaccttgctgggaaacaatggtgggacaggtaatgccaccaacagaagtgtatggcaattagtagattaaaaaaagagagtcaatatctcttccataagattggcttttaaaaaattgcttattagtaaaaatagctaagatttgttgaatgttgactgtgtgctggctctgaatttcatgtatattatctcacactgtttgcaaatctatcccttgaggtaaatactatttgtatgtcccctttacagttgcatataaaggaaggatagttgaaaatggtgcaaagagatgtttactatctgtattataataaagcactcgatttagatacaggccaaagcaaatatttaaatggaactctatttagtgttacttgtttgctgtaaaacaaaacaaaacaaaacaaacaaacaaacaaaaacagagtcttgggggtggccaagacagccaactagaggcagctagtgtgcatggctctcatggagagaaatagaggggttgagtaaatatagcaccttcaaccgaaacatccaggtacatgcattggatctaatcaaggaaacaacttgacccatggagagcagagaaaagcaaggcagggtgacagcccacctggtagtgacatgaagccaagggatccttctatgcccagggaagtggtgagtgaatgcacgaccttgggaacccatacttctcccgtggatctttggaacccttgtgtcaggagatatcctcatgaacccactccacctgggccttcagtccgacacacagagctatgtggagtctcagcagagcagccacttaagcacatgcagagacccgggagccttagatacctgggcttttctttttgggcttcctgtcaaaagtagctatacctctggcaaagcaggaggttagacccccaaccacaccccttagaaaaggggctgaatccagtgacagtctgcaggccccacttcacagcacctcacagaatgaaacccactggcttggaactccagccagttaccggtagaaatgttgcacctccctgagacagagctcctgggggaaagtgtgggccatcatctttgctgtttggttgacttggccattccatcattcaggcttcagagagtccaagccaaccagcggctgaagcagaccctgagcacagcatagctgttctatgaaaatgtggctagactactttttcaaatgggtctcctatccctttcctcctcactgggtaggacctcctaactggggtctccaaccacctcctacaggtgcgtttgggccagcaacgggtctgtacatttctgggatggagcttccagaggtgggggcaggctgccatctttgctgtttcacagccttcactgttgctacctccagataataaaacatctgaggtgaccagggacggatgtggggtcccaatatactgcagcagccctatgaaaaagtgaccagacttttacatgggtgcccatccccatatcggctcaccagacacatcctccaggcctaggcctccagctaccctctgctagaattatcgatcaagtagcagctctgtaactccctggacaggatccccaggggcaactgaaagttcctctgccactacctctgcagtagaactgcccttgctacccttggactaacaaaggaacaaagaccctaagcgcctcatccatacctccaataagctgcagttgactccaggagagaaggccagtctgtctctcacaggtcctacctacccccacccccctccttgtcaccagacagggaacccccagctcggacccacaacatagaacatccatcctgggctaattgcaaggagtaattgctgacctgcatctcaatggggtggagcccccaggagataagcaaaagacccttggccataaccatgccaaggtatcttcctctgctgctgccaagttggagaagaaacataacgctgagattgccccagagctgaaggggcagcccaggagtgccaagccgtaatctacagccagctctcaagggggaaagaaatctacactttcagagcattgagagggaacatggctgcaactgtgcggcaacacaggggagcctcacaaccaagcaagagtctaccaactgaccaatatgccgaagtgccacctactggatcacattccccaaagcatcaacaccaaaaatatctcactaacatacccccctctgaaaccaaagacaagtactcagcttcaaataaagaccctgtgcaaagccttggcccaatgaaaacttccaggaaagatgcctattgactgtattcaatctacattgcagttaaaggaacacctacacactgagatgagaaagaaccaatgcaagaactctggtaactcaaatgaccagagtattgtatgtcctccaaacaaccacaccagttctccaacaagagttcttaacgaggctgagctagctgaaatgactgaaatagaattcagactgtggagaggaatgaagatcattgagattcagaagaatggcaaaacccaatccaaggaaaataagaatcacaataacacgacactggagctgaaggacaaagtagctgttataaaaaagaagctaataggtctcataaggctgaataacacaatacaggaatttcacaatgcaatcacaagcattaacagtagaataaaccaagctgaggaaagaatcttagaacttgaagactggctctctgaaataagacagtcagataaaaataaaggaaaaagaataaaacgggaagaacaaaacctccaagaagtatgggattatgtaaatgccaaagctatgaatcactggcatccctgaaagggatggggaaaaagcaaacaacttggaaaacatattttaggatattatccatgaaaacttccccaaccttactagagaggcaaatttgctgccagtctttgctaacagtcaaatttaggaaatacagagaattcctgcaagattctacacaggaagatcatccccaaaacacacaattgtcaggttttctcaggtcaaaatgaaaaaatgttaaagacagccagagagaaagggcaggtcacctacagagagaacaccattaggctaacagcagatgtctcagctgaaaccctacaagccagaagcagtcagggtcctatattcaacattcttaaagaaaaaaaatcttcaaccaagaatttcatatcaggccaaactaagcttcctaagcaaaggagaaataagataatttttgggcaagcaaatgttgagggagtttgttaccaccagacctgctttacaagacatcttgaaaggagcactaaatggagtaaggaaagactatttgcagctaatacaaaagcatacttaaatacacagaccagtgacactgtaaagcaaccatacaaacaagccagcataataatcagtgaacaacacaatgacaggattaaatccatacatattaatactaatcttgaatgtaaatgggctaaatgctccatttaaaaggcacagagtagcaagctgtattaaaaaaaaagcaagacccaatggtatgctgtcttcaagagacccatctcatgcttaataacacccacacgctaaaaataaagggatggaagaaaatctaccaaccaagagaaaacagaaaaaaacatgggttattgaaattaaaattcccaatttcaaaaaaaaaatgcaaaaaacaaaacacacacatgcacacacaaatacacttcaaaccaacaaagataaaaaaaaggcaaagaagggcattacataatggtaaagggttcaatgcaacaagaagacctaactatcctaaatatatatgcactcaatacaagagtacccagattcataaagcaagttcttagagacctacaaagagacataggctaccaccacccaataatagcccaggccctgatgaattcacagctgaattctaccagatgtacaaagaagaactggtaacattcctactgaagctatttcacgaaattgaggaggaggaggaacttcttcccagctcatcctatgaggccagtatcattctgctaccaaaacctggcagagacacaacaaaaaaagaaatcttcaggccaatatcatgaggcccatcaattcaaaaatcttcaacaaaatacttgcaaaccgaattcagcagcacatcaaatggctaatccaccacaatcaagtaggcgtcatccttgggatggaaggttagttcaacatatgcaaaacaataaatgtgattcatcatgtaaaaagaaataaagagaaaaaccacatgattatctccatagatgcagaaaaagctttcaataaaattcaacacccgttcatgttaaaaactctcaataaactaggtattgaaggaacatacctcaaaataataagagccttctatgacaaacccacagccaaaatcataatgaacggacaaaagctgaaagcattccccttgaaaaccagcacgagacaaggatgccctctctcaccactcctattcaacatagtatttgaagttctggccagggcaatcaggcaagagaaagaaatgaagggtatcaaaataggaaaagagggagtcaaattatctttgtttgcagatgacatgatcctatatctagaaaaccccattaccccggcccaaaagcttcttaagcggataagcaacttcagcagtctcaggatatatcaatgtgcaaaattgctcgcattcttatacaccaacaacaggcaagcagagagccaaatcatgaatgaactcacatctacaattgctacaaagataataaaatacttaagaatgcagctaacaagggaagtgaaggacctcttcatggagaactacaaactactgctcaaggaaatcagagaggacacacacaaatgggaaaacattcaatgctcatacatgggaagaatcaattttgttaaaatggccatactgcccaaagtaatttatagattcaatgctattcccattaaaccacaactgaaattcttcacagaattagaaaaaaactattttaaaattcctatggaaccaaaaaagagctcgtatagccaagacaatccaaagaaaaaagaataaagctggaggaatcacactacctgacttcaaactatactacagggccacagtactcaaaacagcatggtactggtgcaagaacagacacatagaccaatggaacagaatagataacttagaaataaaaccacacaactacaaccatctgatctttgacaaacctgacaaaaacaagcaatggggaaaatatttcctatttaataaatgttactgggagaactggtagccatatgcagaaaattgaaactggacctcttctttacaccatgtataaaaattaactcaagatggattaaaggcttaaatgtaaaacccaaaactatgaaaactctaggagaaaatctaggcaatatcattcaggacataggcacaagcaaagatttcatgacaaaaatgccagaagcgattgcagtgaaagcaaaaattaacaaatgggatctaactaaactaaagagctccagcacagcaaaagaaactatcatcagagtgaacagacaacctacagaatgggagaacatttttgcaatctatccatctgacaaaggtctaatatgcagagtctacaaggaaattaaacaaatttacaagaaaaaaactggatcccattaaaaagtgggcaaaggacatgaacagacacttctcaaaagaagacatacatgcggcaaacaagcatgtgaaataaaacttcatatcactgatcattagagaaatgcaaatcaaaaccacaatgggataccagctctcaccagtcagagtgattagtagtaaaaagtgaaaaaataatatgctggcaaggtcgcagagaaaaaggaacatttatacactgttagtgggaatgtaaaatagttcaaccattgtggaaagcagtatggcgattcctcaaagagctaaaagcagaactatcattcaacccagtcatcccattactgggtatatacccagaggtatataaatcataaagacacaggcatgtgaatgttcattgcagcactattcacaatagcaaatacacggaatcaacctaaatgtccatcaatgacagattggatagggaaaatgtgatataccatggaatattatgcagccataaaaaagaatgagatcatgtctgttgcagaaaaatggatctattatccttagcaaactcatgtaggaacaccaaatactgcatgttcttacttatatgggagctaaattatgataactcatgaacgcaaagaaggaaacaacagacactggggtctacttgagggtggagggtgagaggagggagaagagcagaaaagataactattgggtactgggtttaatacctgggtgataaaataatctgtacaacaaactcccatgacacaaatttacctatgtaacaaagcttcacatgtactactaaacctaaaataaaagtttttttttaatggataatttggggagcacacactaagaaattttaataatgtcaatttttgttaaataattttcccttaaaagaaaaaaaatactattttaagttatttgttttcatgatgattttgtaaataaccccagcccaagactagccataccttaccagagaaaagaaataatgtttcatatggctttctatcccttaagggaaaccaagacaaataaaaccaaacaaaacccaagaaaaatctacttcagatctcgtatttttatacaaatccaatttatattttgaaaagcttttatgatttcatttagttagaattgatattcctaacgtgcagtccataaattgattttggggcttcagattatcattgagaacagcttttgtcataaagcttctgtatgttagacaacagttgagtttagcactgaatgtagtgtttgtgaaattatttgaacaattttttactgcattatttggtaagataacataaaaattgaaggactagcattagtcttataaaattcatataatttaaacaaatatgtaaaaatatatcttaggcttcaatcagatgctcatcaaacttaagccaatcaagatttcaactgtgaaagaaaaaaataagataaatgtgtaaaatgctagacatgtatcattaatgattgagtacaaaaattatggtataattgaaaattctattttattttatttgttaagctttcgggaaccagataaatcccccctttgatgatatatgctattaatttgattttcagacatgcacatttcatacaacttacaggaacatattacatatgaaataataaaatcaaagtcatctgcacttaatacaggagtgcttgtgattcaggatgtggtagacagaataatggccctctataacagtacacattctaatctctggaacgataaatatgttacatggcaaaatggactttgcagatgaaattaagttaaagatctcagcttgaaagaattattgtggattatgtgagcaggcttaatgaaatcataaggatctttataagcaggagataaagggaaaaagtcagaaaattgagatgtaacagcagaagcagaggttggaatgatgtgctttaaagatggaggaaggagattaagagccaaggaatgcaggtggcctcagaaactgaaaaagaaaggaaacatattctcttcccaagtctgcactttgaatttagacttctgacttccagaactgtaagaagataaatttgcattgttttaaaccactacatttatggcaatttgttacagcaacaataggaaatgagtacatcatggtacttgggtctccctgttccatggctttttgaagtgaagtctggttgtggtgcttaacacgagtctgttttatcacaactaagccgctccctaaatcttcagcatacgattcaagaaaggaaaatataggaagtacagttttagaaactgaaggaatttgagacgttctcttctgcacatcctagaacacaggttggcctgaaagctaagaaacctgcactttaacaagcaaaaacatctactgaatgggattaatagaattagctgtaaagagtaggatctgggctggccacttctggagtgaaggaatggattaattagataggaatgcgaatgcaatctaggagaatattcatgtttcagatgcagatggttctgcgatagtcccacacatactgacttaaaagagaagaaataccatttagttaatcctccaccttggaagcccgtggattatgctgcttgtctttttttttttttaaacctgtctgtagtgattttccttgcttcatcatattttcttactgccattttagttggatttcccccttatctttcaccttcctttctccaaggaagcattaagctctagtgggaaagtctgcagaagcgggccaagggaaaaggggttgtggttctgactggaatgttgattaggcagatggaatctctgggaacaaaaagaacatataggacataacaaatctgagtgctggcaaggtctggcctttaagagatcaatatctgtatccatgcatctaaaatttctattctttaattgcttaaaaaatatgcctccaaaaatagtaaaggcagctgctctgtatgtaatgttagatatgcaccctcattcattgttctatgagagcattacagatgtttcctcttctcctccatggataccctctgctttgattttctccaaggatgctatgagactcaaagcacttattgttttgaatataggataatgtgattgctcctttacttctgcagattcccaagcaatcatttagtttcatccccaatggatttgataggtgggcagcagagccattcctctttgaagctatatcctgaggtcttcactttggggaaggggagaaagcaacagctgaagataaaatggctaatgtgccaagtatttcctcctcaaatttttacgtttcattctgagatacgttatattattatttccgttttatagatgagaagactgagacttaggtaatttgctcaagatctctgagaaagtcaatgacaggagccccagttcagcctacatagtctgcttacagagtttgtgtctttgttcacagtgctaaattgtcccccagttagcatcaacacacactccccaaactcctgcctgcaatgtctatatttggtggccttttatgatgttccttgcctattgttttcccttcacctattaataaattatttctttagctttattgatcaaagctgcccaggcattttaactaacatcacgtgtgcaaagtttttaggtgtggagtgtggggtttagcaggaggcctgtgtgggggctgtgctccccatcctgacaagcacacaaggaactaggatgatatccttgagattggctgggctaccattgtttggattctctttcttttaaaatatatttttcctatggtatatgaataaacatttaaaatttttaatacaatgtttgaatcttcttcagatattttatgtgaaagttaggtcactgcttgggaaggaatagaatttcaacctttgggatgaggatgcttaagaggatgtggaggacttccaaaccactctgaaatgttttcttacctgaggaagtcttctagacctggcagtagaaacctaaaaatatccctcatagccttcctctaattgatgctagttattagaatctgagctcaacattgcctggaaagggtgggcatggaggcatgtgtctgtagtcccagctactcaggtggctgagacaggaggattgcttgagtccaggagttccaggtcagcctgggcaacatagcaagacccctgtctctacatacatacatacatacatacatatatacatacatacatacatacatacatacatacaaagaactgccttaggaaaggaaaggagacaaagagtaggaaggagaaaaattatgtccaaaaataaccacaggaatactatcattcattcattttttatttatgagtgtacagaaattgctgggcattgtgtgattatataattggaagtaaaacacttctcagcaaatgcaaaataactgaaatcataacaaacagtatctcagacaacagaacaattagattagaaatcaaaattaagaaactcactcaaaaccacacaactacatggaaattgaacaatttgctcctgaacgactcctgagtaaataatggaatgaaggcagaaatcaagatgttccttgaaactaatgagaataaagagaccatgtaccagaatctctgggacatacttgaaggaactcttcaaggagaactacaaaccactgctcagtgaaatcagagaggacacaaacatatgtgaaaacattccatgctcatggataggaaaaatcaatattgtgaaaacggccatactgcccaaaataatttatagattcaatgctatttccattaaaccaccattgacattcttcacagaattagaaaaaaaacatttttaaattcatatggaaccaaaaaagagtccttataactgagaaaatccaaagcaaatagaacaaaacaggaggtgtcacactacctgacttcaaaccatactacaaggctatagtaatcaaaacagcatagtactggtgcaaaaacaggcagacagaccagtggaacagaatagggaacacagaaataagatcacagacctacagtcatctgatctttgacaaacttgacaaaaacaagcaatggggaaaggattcgctatttaataaatgatgctaagaaaactggctagcctatgcagaaaattgaaatgggaccccgtctatacaccttatacaaaaattaacttaggatggattaaatgcttatatataaaagccaaaactataaaaaccatagaagaaaatctaggcaataccatttaggacataggcatgggcaaagatttcaagacgaaaacatcaaaagcaattgcaacaaaaacaaaaattgacaaatgggaactaattaaactaaagagcttctgtacagcaaaagaaactctcatcagagtgaacagacaacctacagaatgggagaaaatttttgcaatctatccatttgacaaagatctaatatccagaatctacaaagaacttaaacaaatttacgagaaaaaaacatacaaccccattaaaaagtgggtgaaggacatgaacagacacttctcaaagaagagattcacgtggccaacaaccatatgaaaaaacactcaacatcactgatgattagagaaatgcaaatcaaaaccacaatgagataccatctcacaccagtcagaatggtgattattaaaaagtcaggaaacaacagatgctggtgaggctgcagagagataggaaggcttttacacagttagtgggaatgtaaattaattcaaacattgtggaagacagtgtggcaattccttaaagacctagaaccagaaataccatttgacccagcaatcccattactgggtacatacccaaaggaaaataaatcattctgttacaaagatacatgcccacgtatattcattgcagcactattcacaatagcagagacatggaatcaatccaaatgcctatcaatgatagactggataaagaaaatgtgctatatgtacaccatagaatactacgcagcaataaaaaggaatgagatcatgtcctttgcagagacatggatggagctgaaagccattatcctcagcacactaacacaggaacagaaaaccaaacaccatatgttctcactcataagtgagagctgaacagtgagaaaacatggacacagggaggggaacaacacacactggagcctggtcgggggtaagggagaaatgagaacatcaggaaaaatagctaatgattgcaggacttaataattaggtgatggattgataggtgcagcaaaccaccatggcatgtgtttacctatgtaataaaactgcacgtgtaccccagaacttaaaataaaaaaagaagacataaaaaatttaaaaaaatacacaattcaatggtttctaatatattcacatagttatgcatccagcatcacgatagcattttgttttaggggcttacaatataccattgtgcagacatttaatttgttttatttaattagtctcccaagcatattcaaatttttccgtttttaatctggaagaagcagtactttcatgattgtatgtatagatttgtgcacatgtgcaaatattgctgtcataggcatttctaaaagtggattttcttgatcaagctccaaacactttaaaatgtgatggatcttaacaaatttcttcccaacgttgtgcccggtttaacttccccatcagtttatgctcatgctagttcaccacactcaccaatatgaagaagcatggattttacatttgtcattcgtgaggcaacaactcattgttttcatttgtatttttattatgtggggtttcggtatttttcaattttaacggaccgtttgtatatgttcttctgtgaatttttaatttgtgacttttgctggtttctttctttattggattgccaatctatattcatactgatttgtaaaatcttttaatgtgttagcaatactcaccctctatcatatacgttgcaagcactttttccacatttgtctttcaagtctgtaaatagtgctattcaccacataaaattttaaactgctgtgtggccaatattttcctgtttttggctctcgtatcatgtttatgaaatttctcagtaagaagaaaacttttgatttagtaaacgggaaataattattttttaagtaataaagtcagggtgaaatattttttatttacttgatatgactagttgttttcttcttttgccattaattgcagtcttcaagccaatacttctttagaaatatgacagatttaataccaacactaggaccatttgaagacagaactgtgtgttttaatagagataatatctcaacaggagtttgtgaggctgacagtctctgatgttctgaccacctacgtcacaatcctcattggggactttctaagggcatgttttgtgaggttttgcaattattgctggtgctgggacttggagtatggatatgtaagtatgatgttaattttgcttttttttttttttaaatttatttattttttattgataattcttgggtgtttctcacagagggggatttggcagggtcataggacaatagtggagggaaggtcagcagataaacaagtgaacaaaggtctctggttttcctaggcagaggaccctgcggccttccgcagtgtttgtgtccctgggtacttgagattagggagtggtgatgactcttaaggagcatgctgccttcaagcatctgtttaacaaagcacatcttgcaccacccttaatccatttaaccctgagtggacacagcacatgtttcagagagcacagggttgggggcaaggtcacagatcaacaggatcccacggcagaagaagttttcttagtacagaacaaaatgaaaagtctcccatgtctacttctttctacacagacacggcaaccatccgatttctcaatcttttccccacctttcccgcctttctattccacaaagccgccattgtcatccgggcccattctcaatgagctgttgggcacacctcccagacggggtggtggccgggcagaggggctcctcacttcccagtaggggcggccgggcagaggcgcccctcacctcccgggcggggcggctggccgggcggggggctgaccccccacctcccctcccggacggggcggctggccgggcagggggctgaccaccccacctccctcccggatggggcggctggccgggcagaggggctcctcacttcccagtaggggcagccgggcagaggcgcccctcacctcctggacggggcggctggccgggtggggggctgacccccccacctccctcccggacggggcggctggccgggcggggggctgacgcccccacctccctcccggacggggtggctgccgggcggagacgctcctcagttcccagactgggtggctgccgggcggagaggctcctcatttctcagacggggcggctgccgggcggaggggctcctcacttctcagacggggcagttgccgggcagagggtctcctcacttctcagatggggcggccgggcagagatgctcctcacctcccagacggggtcgcagccgggcagaggtgctcctcacatcccagatgatgggcggccgggcagaggcgctcctcacttcctagatgtgatggtggccgggaagaggtgctcctcacttcctaggtgggatggcggccgggcggagacgctcctcactttccagactgggcagccaggcagaggggctcctcacatcccagacgatgggcggccaggcagagacgctcctcacttcccagacggggtggcagccgagcagaggctgcaatctcggcactttgggaggccaaggcaggcggctgggaggtggaggttgtagcgagccgagatcacgccactgcactccagcctgggcaccattgagcactgagtgaacgagactccgtctgcaatcccggcacctcgggaggctgaggctggcggatcacttgcggtttggggctggagactggcctggccaacacagcgaaaccccgtctccaccaaaaccagtcaggcgtgtcggcgcgagcctgcaatcgcaggcactcggcatgctcagtcaggagaatcaggcagggaggttgcagtgagccgagatggcagcagtacagtccagcttcggctcagcatgagagggagaccgtggaaagagagggagagggagaccatggggagagggagagggagtaattttgcgcttataaggtttttcctttgtaattcgtcatttacacacactatataagagaaaggcatcatagagtttagtggatgggatcaccgttttaggtgcaataaatgaagaccaatgagtacatttataatgcagagaagttcagactcgagtatcatggtttacaatattctagtaaaattagcacaagatagcaaaagcaatggacctcaacttgtcagctgaaatgttgaactcagtaaatcttggccctgtagcccaccttctccctataagtttactagcatttctagaagcagggaaagatggctaatatcaactgcatattctatttatgcctttgaattctactaaactcctggatactatcatatgccagtcactgtgcagtagatggggtggataaaaggatttgataaatatggtacttgcttcacaaagttcacagtctaataagagctcgaaagagacacacacaagaggctgcagaaggttcaaggaaggcctagtttgctgtcatgcatctggcaagtggtggagctgaattctggcaggggcggcttcttttcctgaaacaatggctcaggtctctcagaaccacactggtgctgactccatcaccagctttccttctatggtcatcctcaggtcccccaacaaagtctgagggcaacagcacactcatcaccctgtgattagcacattgcctggtttccactgtcctcctttgagtcaaactggtctcagtcatcctggaaaatatgacctggggggttggtagtactcatttgcttaaaatcttccagtggcttctcaagtacttagaatgatttccaaatccctttctaggccttcagtaccctggatgatctgctccttttctttctctctcaagtcatttgctacctcttttgctcttgctttgtaaagttcacatgggcttctttttatgctcaaacatgggctgctttttatgctcaaacacaagatggtccttgcatttgtaattgctgtttctcccgcaaggggtgctgttgccctagagctaggaatggctggtttcttcttgtcattaaagactcagctattatgttacctccttagtgctcttctctgaccacctattctaatgtagccaatcaggcactgtttatatcaacacactgttctgttttcttcataagatgtgcatctatttgacattactcttgtaaaatgtactcatggtctatctccctctgttagaaagaatactctatgaaaatagaggccctgacctctcttatttgaactgtgtgagtcacgtagcaggcagcatgtgttggctggctgtttgaatgttgaaccttctcatttttgcaccatcaaggcagcactgtctattgccagaactctgcctccttcgaagcatgtgcccatggagtctcagtgtttgtaatgtttttgagttattgagccagtaatgcttctctcctcaccagtgagggaatatcctttatagctgatcttctatctcttttatctcctgccctctagtctctggatgagtccaacagttaggactgttttcaagatttcaggctagatctgtctggctgtctgactttgagatggtaccttttataaggtcgtctccatcaccctcattgaaagtgcctcctcggactggccaaaagcagttaggtaatgctcttcggtgaacgacagtgaggtaatggctacagatacaggatgctcttgtgttgctttcccattctttgctatgaggtattcagctggcttggtttcatttctattttccttacctgattcagctcctctgaggcagacataaaaattgccatttcttccttagaccattgcttggcttgtacttaccttttatcccttggctgccttcttcttaagtggcagaaaatctgagtgcaaatatgaagtcaatattacatgacctggatgcataaaagctgtaattaaatgactgtaatttattatttattgactgctgacagtgttcctgggttagtagaaagtacaggaaaaaagacaagttcctgttttaggtcacagagaaggaattttctcccacgttacctttggaaggctcaaaaaagctctgtcagaatcaaaacaagttttaaaacattaatgatggatgacgaatctttgatgtagatcccattgtcattgacttaccaaatggatagcttacacgggtgagggcctactaggtgcaagccattatgaacaaactctgtgctaggtgataaaggaatacagggatgtagaagatgtagacttacgtagaggttgcaaatttggcctgcagggtagattcagctaatggatatttttgtttggtatgcccagtggtggtgtttgtttttgtttcattttttatgagctaatattttaaaatgagagctcttacataaaaacacatggatttattgtttttcttgaaaggctggcaacattaaatctgtattcccactagggagaaattggctggagttgagaaaccactgccatctgcagttgggatattcattctccagttcctcatactcttcaccactcttttctcttacaagctcccgatataaatagagaaatcaattgtatggcccttgaagagaaagtgtgtgtgtgtttgtgtgtgtgtgtgagagagagagagacaggcgtgcatcagtagaaatgcagacacagaggaggagacatttgaactaagtcttgaagaatgatcaggatttcaagagatgaaagaaagaattcccggtggagggacaagtgtaagacagagcaccagagatagatagtgtgggcaatccaggcatagattaaaaaaaaaaaaaaaaaaaactaaaatgaggctgttttagagcagaaaaggctaataagaatgtttctctgctattctcctagacctgctaatcaataatatggtttcagaaagtacctgtcatgaagggaaggacaacctgagataggcagaggacatacttgagaattctgtcagaaataaaagataaaatcatggtcctttctactgtatgcatgcatgtgcatgtatacacacacacaaagcacatgatttttttcttctgaattccaaaaataatgccagtttattgtagaaaatttggaaaatataacaaagctaatatgaaagtaaaaatcataggtaatctctgccactaatgagattaattatttggattgttgaatcaaatagtgttagataacaagtgctacatatttatatatagtaacagatttttataaatatacacatatatacttttgtatacgtatatatgtgtgtaaacaggtagtagagtagactggttacttgcttttatttgttttacctaacactgatcatttcccaatgctattaactgttgttttgtaacataccttttaaatggttgtataatattctgtatgcaaatgtagtataattaatctaattagtttttaatttgctttaagttgaactgtctaattattcttatgataataagtgttgtgatgacatttaattatatccatgtacataagtatcttcatagataaatcatagtggatgtacaaattattttcttatgataaatttctctgagttgaattgctcagtcacagtagagggctttaaaaaagtctattcacttttattacaacagcctctgtagagactctgcagatttcagcattagattcagagatctatagaatgctaaagttaggtggattttgacacaaccagttgtaatgcatgtatttaacatatgaaaaattgcatctgtgaattgaaatgaggttcctaagtttatgtagccagagaataataaggacaatgaagtacacttctggacgaaaatgttatgttaaatgtattgatttctgtactggctctatctgagtaagctgggttaaaagggattgtgaatatttttcaagacacaaatttatggtcataatgttatcacaacaaacctatgaagattaactaaggtggaaaaattactggcttggagcagattaccagaccaatgtaagttaatgtaatgtaagttaatgtctccaaaggcttctctgagcacagttctcagtgtttcagaagagttcatgaggagtagaatagtttgtccctaggaaggattttaactgctctaatttaatacaaagtgtgccctcttgtaaactttgggttttctttggcagttcaatgcagaatatctttatcttcacttcagttttcattgacaccattcttactatttaccagcaaagcaagtaaagaatattcaagaagaaatagaattagattcagggcatgatggggtaagggaatgttcaataaactcagcatggtgttcacagttgtatttttaaggtgatcattgctcactcgtaagtgagagccgaacagcgatgggagacttctttaaagtctgatgaaggatgctcaggattatccataaataagaggcatataattgactgactaccttagtggattcccaatcatattatattgtattatgtcacatctcaatgtactgcttattttgtatcagaaactctacaaaatactttacatgtattattccatgtgatcgtaccagcaatgctgtgaggtggtattattgttcctactttacagtaaactgaggcttagaggatgttaaataattgctcaaagacacattaatggttagtggtagagttaggcctgaaactcgagtctcatcaccttcaaagccatcaaccaaatttccatcatgttgaatttacaccgtaatgcttgactctagaaattttaaaaattctgccaaaacttgaataattcatacactaaacctatggcttttggaactcaaagtgctcataggcttaggcaggctacctgtggtagaatggagttagcaaatgaactgggatacagaattagaagatcaactgttctctagctgggaacgtggagatattatatatcagttcgggaaggtagaatgataaagaatcaggaagaaatcatcagcatcccataaggggttgagaacatgggaacagggacaatgcagactgtattttaagtgttccttgaatatgtggacaggatctgtctgcagttaacaggatcctattctcaactagggttgaagtacaaagcctcaagtgctcaatcatcctagcagacgaggctagagtttgtcctagatcagtgcttctggaatttgagcatacatcagaatcccctgaggacctgtgaaaacagcatttctgattcagtagatctgaggccaggcccgagaatgtgcttttctgacaagttcccaggtgatgctgctgactctcgtctgaggaccacactcaaaagccactgctctggagccacagcccagactagcttgcagctctaagcagagtgattccagctgtgagaaatgggatttatgtgcagaaggtcaggcaactcattccacaacagaattaattctctctgagatcctgaattgcatttcatattatccacaggttggcaatctgcctcaaataatgaaacttgcagagagagaagagatcttcccaggctttttctttgtcaagtgagcaccatatgtcttccctctgggtggatgactgacttagcacatcacaagcaaaggtccaaaaattaaacaacatcatttccaatccctcaactatgatggactttagcccaaatccacatgggcttttctgatgctggcccccaacagtcttaccaggaatgagcagtcattagtgagtttattacacttagctcattcaaataattttatgatctcaaagttcaagagaatctgtttttttttctttttccctaaccgttttttacctttgagctttttctattttagagacaaacaaaatatattgcaaattgatttatatttattaaagtattgctttaaaaatttaaaatataatataacctaatgtttataaaagcctacctctaaaacaatgagcactgacttttatactacatatgtgtagtttttctgccttctcttttgttttagttttaaagtgagagcttctgtgtttattgcataagttaaattccatttctaaggtgtttacagagaagcaattctttcataactggttctaattttcaaccaataacgtatttttagactagaaagggatcttagaaatgaactagttcagaggttggcaaacttttgctgtaaagggctagatagtaagtattttagcttttgcaagccatggtgtctctattataactgctaaatgctgttgttttagtaccagtcatagataatatataaatgaatgaatatagctgtattccaataaaatttatttgttaaaacaggtggcagtccagatttggcacatgggccatagtatgctgacctttggtctagttcatttttgatttatgtgtcaggaaactaagcctaatgagataagtgacctgcccagcttacctagctaagaaatggtagagtgaagtctaaaatgcaggtttgaatcccagtcaaatgtctgttctacaaatccacttggtccagtatggccaccctgtatcctttctgtgcatcaggccaatttatagatcaagggggttgttcctccagctgtccctgctgcaaacacagcaggaagctagggaccctagggtgtcctttatgcttttctagtcaactagttataaaatgtctcatctctaatgaccctcaggagctctatgtgcttgtgagagagtgaagaaaacaggcatttaaaacgttgagttttctccacgttcagtagtttggtgggccacctcatgataccattctaaggaggcgaaggcttaagatttgatttttaaacagagacagagaaaggctgttccaaggcaacagatgggtacgggccaaccgagtaagcatttttcagatgtgttctgtgatcacacagggctccaggggaaaagtgctgaagatcatccagagcagggcactcccccagaaggaaaaagactcagagttaatgttctccagataagaagcagttcatttttctccatgaaggacacattttttttccattgatgatttcagcacaaaaactgtcaaccaaacctttttgcctcttgtgaacattgcccttctagaaagtcggcaaactaacgaaacactttgtagctgtccttcaacagtatctagagtgatactgcagttatccaggtcatctttgttctgtttaatacacaggactctttattatttcattatgtatcatcctatcattttaccttgagggttaaccattcctgttatgccatacttgctcttctttccctgaatctgttacaagggagattgtccctatgtttcagttgaataggagagtaatactgccttttaggaaagtgatgaagttgaggcctggattcatgagactcttgaggccaagcatttgaaaattgagaatggttttgttggagttccaaatcaggaaccaattctatctttttacaaatatatttttgagttcttgggtttgggaggaacagaggctctcttggatcatctttgtgtgtgtgtgtgtgtgtgtgtgtgtgtgtgtgtgtgtgtgtgtgtgtgttggggagggagctgttatggggatatgtgtggtctgaagcacacctggagataataagatctgagcagtgctaggaacctgccaatgtcttggtgtctttttcgtggtcttcttggccctctcatttcgtatttactgcattcttattcccttattaccagttggtcagtctcctctgattctctatcccaaattaaataagagccagttttattgcccttgctaattagcatttactccattgttagaatctcctgttaggatgcctaatgcatcaccaggaagcctttagatgggccaccctatcacagttaaccacttccattctattggttttttgtggctcctctgtacaaaaaacagcctagtgttgctgccctgagcatgaaggttaatatccaagacatggagactggacattgaattgagtaacttcttaagctttttttatatttcttttgctgtatttactttatgttaaagttaattcacattttcattgaaaaaatttttaatatgcaaaacttgaaaaagaaaaggaaaactatagttcatcacccgcatataaagtatgactatcttgctgattattttccagtctttgtgcatagtttcatatagttgattaatgtgtggctttatattttttgtttaacattagagcacagttttcctcatgtacataaatattctttcaaaatgattgtaattcattgcaatatatcatagtataaatatactgtatatacataactaatgttcaacacttagatggtttcatcattgcttgttaaagtttatcatcacatcagataattttattaagacagattctagaagttttcttacagaatcaaaaagaataagatttttaaagcttttaatatgtactgtcaaattgtttttctgaaaggttgctacagtttttactgtcaccagcagtgtataagggagcctgtcttgctgtactttcatagcattggatgacagcatttaaaaatgagtctcactgtgtttaaaaaaaaaaaggtgctttctttgttttatttatatctggttacttatcctagtgattattctgctattgttgctgaagggaagtaattgaaaccctagccatgcctatgcagaacaatttgcctttcagttttgaccatgtgagacgctaatccaatgaacattgtgtctcctctagccttcatacaccgaattcgacatcagtggcaacgtcctcgctctgatcttcaaccaaggcatgatctggtaggccagctgttggacagcttatcacttacagaaaagcctcccaggttatttttgcatacagcattgaatcctggtgttagaggagaatacaatcggtgtctaactccatatttacttttgcaaagtggatgcctgtatatagtttccttttctttcatatcttaaatgtcagtcatcaaaggtgtctctctgttttgcaaagcacttcttcatcaaataatgggagtctgtgttctggttagcagatttatttgaggactatatttttatattttgtgacgccaggatctaatattaaaacattaataattacattaccacatgataagtatgaaataaattaacataaggcctttccgagagaccgagtttattttgttgtcactactaaatatatttaaaatgtaacttatagctacttttaaaaataataccttatcaaatccaatagtttatcgagatgaaacgcatgttttaggaaggtcgagttaaaatatgatcttcattttgtaacttgttttatagggccatggcacatcagaattattttttttgatgtgtgaagggttgtcatatcttttatcaaattagagcattctcactgtaaacttgacaggttaagatgagtcgatacagtagaaatcgtttttgagtttaaaaactgaatcacgacatccgattcatctggggaccatgtgtcttggaaatctgtcacttcagatttccagcctacaagcagttacaataaggctactttatcctggggacatgtgcctaagacaatattatgctgccaaccataccattgtcctattcacaagtgccggtatagactcagtttttgaacaagtttcatatattgtaccaatagatctgtcctgaattattaaacctttgggtgctgacagacaccggacccctctgcaaatgctaaaaccgtcttgcttctgtcacacaaagacaactctccagggctccatcgtcctgccatgggatgactgttaaattcctgtgcctgactaggtgaatcaatatggaaaagatattataaaaatattgtttcctcctttgtcaggtaggtttaaaaatctaatttttattcccttcctttctaaattttccaagtatgactcacatgtccagactcactaaggaaggaaatgcatcctacattttccaagcagggaggaaagtcaaggtggcccgaggaacgtctactgacacagaagtaaagggagcagcttctgtgggttctgagctttcatttcctggagttcaatttgctgttatggcagaaaatggctaacacggctatgggagtaatgagaaaccactgttctatcagtggcttttacacaaagtgtcataaatccttcaggcctcatgggtaccattcacgcagacatatgctgcacgtcgattgtgttctttcagagttaagacaacagattggtctagaaatttgtttttattgtcagaaaagctgttataatggctgtcctgcttggtttcactactgattttgcaactatgttagtccactattgttcatattgaaattcttaaatatctaacatgtttttccagttctctcgtgggcagatccattatcaaaatctctgcactgtctttttctgtttattaattcttcagacagtggtcaagcttgcttctggctaatttgaagagaatattgagttttttgagcatacaaagatattcacacactttccaaagttccagaagcaaactgaccattattctattattcaccttcacgtcaatgcttggcacaaatattcttttcctaaccctaggaggctgatgagggagggggatgtcatgtagagggaggtgtggggcaggtgtaatgtaaaattagtaggctgactctgcacaaaggtcctcacacacaatcgttccattattttatgaagcatgaggatataatgcctgagcttaaccattttctacagaaacaattaaaaatgtacggggatgttttattcaattccattggcttgtgactggagatattgaattactcctttaggaatcgctgagtagtggaggttatttacgcagatgttgttaacatcaacatttatagataaaatccattttgctatgatttggttgaatgattagtaacctttatttacgcacttattttttgaaatacacatgatagtttctgtgctaatatttttaaatgatgaaagcacagaatatctttatcatagcaggatattgagaaatggcagagaacacacagtgagagagaaaatgagttttggacattgctccaacactgcttcactgggtactctcccgccaggtttatcacctttttttcttcactttctcagttgatcagatgtgaataatttacctgacatgtacatgtcgctgatgtaataaggagagttaaataaaagaagctttcattttctttgatcttccaggaagaaaagaattttataaggctaaagtgttacaatgatttttactgacagatgatgggatcatgcctgggtaagggacttagtgagccgagctgattagtaatgcatgagtaaagataggatgagcattaacattcggatattattatgccaggacttatttttctagcttatggctcttgagttatttgtttaaaatgtctttgtgatacttattttgaaattttgaaatttatttatagatgtatacacaaataataagcatatacatacaaacaatgtgcacgtatataggtacaaatatatgtggttttaggcaagtctcgattttgaattacgtgcaaaattatattttagaattgatcaggttatgcagcaatgaaacaacctcaaaatcgtagcagctcataaaaggaacatgttcaatgtggggtggaagaagagctttgctcttagaacttaccttcactttagagacccagactgatggaataggatccatctgaaacattgctatcacactagcagagaatgaagagaaggaaaaccacacaggacttttaaagtttctacccagcagtaaggacctaatttctattcatactttattggccaaaacaagtgatgtcaccacctgatttttaggaagactcaaagtgtattacatcaacatgtattggtattggggagtataatctagtgctttgcaattctaacccattagctgggactatcacttgcttacttgctcacttttttggcgttccctctctcttgctgtcctgtaacaaaagtatactgtattgttttaaaatctgtcttctcattagaaaaaaatagtttaacttcctacaaagtctttgttcaattcattatggtaaaatatcattcgtatctattgtccgaaatcttgtcaacaagacagcccaaattgtgacaatattccacttttcaaataaatgagttaactttgggttggcaaaagttcaattatagtggaaactaatttcttcatctaaattaaaaatgtctctataatgaaccaaatttacgttggattggctaaacaactattcagggagtacaaaatgctaaacctagctataaatgttgagggcttcattatagataggacagtttaaaagacagggctccccttacatttttaaaataagtgcacatatatcttctttttgattttgaaataataaattgctatttatattgatttatggtgctaatgaattttctcatccaagaagagtgaaacttattttgttgaaataatcaactaagccatcaagtaaaagtgaccacacctaagttgttcccacctaaaagtagtattttaaaatgcttataaaaactcagatgcacaaagcagagaattcccaagacaagctaaagtaagaaagtaaacagataaactaaatttaaataaatgtgtggaattttcatctcaaaaacctataagctagttataaattttcaataaaaccctattttaggaggcacaaacacatcattgcaattggctttaaaacaccatatcacctacaaagagaaaatgatcaacatcagaaagagaaaatttattttaatttttttctttcattaagcaaaaaacttttttcatttgtacagtcgtggcccactgcaaccttgacctcctgtcattaagcaaaaactaattattcatgacagaagtgattaatgcaaatgtacagtttttttgagtagaagaagtgactttaagggttaattatttttaacaagttatatttataggtgtattagtcaatgatataagtgttggggaaagtttattttagaattagaagaaagaagtaaaacaattgtaaatattgtttactctgttgtagtttaaattcactaatgatagtaggtatagttagttacagcatcctttctatgaaataattatgatatgcaattcctacaataatggggaaagtggcaaaatgtgtttagaagttggaaatagataagtgcagtttctttatgaaaagggtttgtctggttgaaagtggcagtgtattttctgcctttggaaaagaagcatgatgtcaaataaacaggtgcagtgtgactttgttatggagtaaagactcaaaactgagcagagttctgttttctttctaggatgggctccttctttgctcccagcctcccaggcatcaatatccttcgactccatacatccatgtacttccagtgctgggccgttatgtgctgcaatgttcctgaggccagggtcttcaaagcttccagatcaaataacttctacctgggcatgctactgctcatcctcttcctgtccacaatgcctgtcttgtacatgatcgtgtccctcccaccatcttttgattgtggtccattcaggtctcttgcttttgaaatttgactcaggcatcgtgttctttcgggggtggaggtgggaatggtcattcattgtataagctattttttccccccaaacaatgacatttttggttggtggaaatgagatcccggctgggcgcagtggctcatgcctgtaatcccagcactttgggaggctgaggcaggcagattacctgaggtcaggagttcgagacaagcctggccaacacggtgaaacctcgtctctactaaaaatacaaagaaaaaaaaattagtcgcgtgtggtggtgggtgcctgtaatccctgctacttgagaggctgaggcaggagaatcacttgagctcaggaggcggaggttgcagtgagctgagatggtgccattgcactccagcctggaggacaagagcaaaactctgtctcaaaaaaaaaaaaaaagaaagaaatgagatcctttgggtattcaggttcaataggtgacatggagattcttaggcaagttctgtctatttcctcatttgggaatcataaaagagaaaatactttatacttttccaggctctgcctgggtaaaatatgtatggtgaatctgagctgtttccatgttagaggatagctaagagcaaggtctgatgacagtggtctggatgtgagtttgcctgactctgggccgtcacatccagacgtggtcagctatcactacttctcttgtgcattactaccttaaaaagagagagagagagacagacagagagagagagaataccccacactttacctaggaaagagaattattactaaatactaatgagcataaggagggccacccaatttgttatccaaaatatcacatgctagtgaaaaaaattaaggctgttccacatatatattctctcctaattatcattcaagtcaggaatcgagagtcacaacggctccttgatccaatttagagatacacatttctacagttctctatgacagagctctcttctctctatgacacatatcagaaacctaagtccctgggatctggaggatgaagtttctttccctaaagggccttagaaatgaatctactacaagttctcccaagaatctctgcatgttgattcactggccagcatgcacttgagctgtttctccttttcagtgaaggaaatgagactgtaaaaagccatgtgaatgatatgcatgatgctgtaatgcccacatataattcctccattatgttgtcagacccaagttatttaattaaagtcaaaaggttcattgctgacagactaagtatataagagacattttcactcttaacagtagtctgagttattgctttgctggaaaacaagaaaatgttaagccagctgatcgagttaaactagctggacctctgtctactcagagaactgatgttgagaagctctgttaattccgttgtgtgtgtgtgtgtgtgtgtgtgtgtgtgtgtgtgtgtgtgtgtgtttccaagtgggctgaaataaataatgcagacagtgacatctggagactaaatatgaaattacagtcttgatgagacattcgtctcaataaattccgaaccaatctcagagtacaaagttcaaggaatatgccattcaaaggctttagttaattgcaaattattcacactacttattatccaggataagtttaggtgtgcattaagctattaattggaagttgatccttctcagtaaaacatagcaaaggaccctagctgcctgtaagggaaaccacacaatgtaaacatggatctccacagatgcattcagatttacaatacgtcttagacatgaacaatagttgcacaatttcagcttcttaagccctaactcttctggctttcctaattggcaaacttaggcaaaattatggcatgtaaatcactattttgaaatcagggaaatttattttttatttttaaaattatttatttgttttttaatttccataggttattggggaacaagtagtgtttggttacttgagtcagttctttagggtgatttgtgagaaatcagggaattttaaatattttcaatggagtactgggaagggttatctctatgctatttagattttttttttcatgtcagtttcctcactttagagccaaaggatgtttgcattgtttatttgtctggacttaaaagtttgaaaggattgtcctgctctagaaatgaggtgagaatgcttgtatgcttgtactagtgggtgcctcatagcttgtcatctttatgaaccccaagttttaggtgatttgcttaaccttcctggtgaaggttgtctgactctatctagatcctgggcaagcaggaatttaggaaatataaatttgaactaggttactggaggtatcacagtgatggctagttgctctccagtgtagggaagttttcaggtaagatggctatagtatatttatccattcagtaaagcaatttgatgagatattctagcttgtctggttttataagacctggctagagagggtaaattttccaagaaattattccaataggctagtaagtggatttatcgtaaatagttgacaatttaaagatgtccagatgaaggcaattctaattgttctatagcatttcctgacacctgatgtttcctcccatctatgtcaataattctgaacaatttatagttctctaggtttttatatacatccctgcttacattatgacaattttatttttcatatattttcatcttactgcaaagataatatgtgtttatgctagaaaacctaaacattgtagaaatatttttacatgaaaagaaacatggcccataatcttgaaaacctgaaataacaactttttagcattttatattctgttttgcctttcatgcatgatttttcataactgagcttgtactgacacaggatgtttctcagcctcttcactggactcacagaggggcaccctgtctactcggcctgctgtgcttaaccccttgtgggaggaagcacgtgggcaagtgagtgcgggatctggcgagacacactgggcactgacacaggagcaagctccatgtggggcccgtggccagaccaggtgtgtcaccttgaggagaatgcaatggtgcccaagtgcctatgaccctaaagccccagagggggtgttacaatgcttcctgagttccaccatcctcagcctgatggatggcagtgtcttagcagctcagttggccccttgcctcatcatgtggggcagctgccctccactggagagggcaaagggccagtgtgacagtctttcctgggttcccacaatcggtgggtcccaagctcttgtccagcatccaagaagaatgaggtcacatggattattgaaggatggtgaaggaggagaattttattgagtaatgaaattggctctcagcagagagggcagttggagaggggccaggaagggcaggtcatcttccccaaagtcaggttgtctcttctccaaagtcaggccgactcttccccaaagtcaggccgtctctcccctctaccaactgagtctgtggtctttataggcacaggatggaagtgtgtgctgactggtttgtgagtatgcaaaaaaggctaaagtgaaggtgtcactcaaaggtagacacgacagtatagaaacccaactaggaaagggtaggtatatgtaaaataggtgaagggtggggatgaatcagaggaaagtgcgccaaacaggaagacaagttctcaatccggtctgaggatttaacttggaccttggctttcaggctttaaactgtctttggcttggaggtggcatttcaccaggtacctgcccctatctgcctaggcatttggctgcctcctgttgctatcagtatactaggtgcaggttttttagtattaaaagttaaaattatattgtgagactgctattatattggtcatttgcaatcatgctttatgcatctatttttcttaatagtttagctgacttctagagattggggatagagaagtttcctctctgtggatctaggacacagtaaagtgctggtcaataatttgaatgaatgaatgaataatgactgcttattgtgcactaagcactagaagagacacagggttaagtccatgcattaagcattgattctggtcctgtggcacttatcacccagctgggaagacaggcctcctcataaactgttctaatctagagtggcgctatgcctacagcaggactatggatagacacagacaactggaaaacaattctgagaatattgtatgatagcatactttggctaacctggcaggagaaggcattgccagggacatgtagatgcgtccataatttgtacgtaattaagatatctggactcctttctttggtaaaagacctgacctgaaaaaggtacacaggaatccccagggacttagcaactttgctttgggtcacactggatgctgagaaggcctttgtgtgtagggataatttcataaaatttgaatgcccccactctaactacgttcatcagctatgacctgaggtgctggagaagggaggatagatggtcttatcttttttggtacttttaatttatctgcttatcctgtattccatctggctggggctgcattggggggtatgaacaatttggaatggtgaaaaataaaacatattggaatagggagttataatcttatattgcttgtaagcttcattccctcttatgtatcataagtcttgaaaattagagtgtagatctttaatttgtgaagcaaaacttgtacctctgtagtccaatgactactgacaaaatatatggagtcactatgtctgctggaagatagtattggttagaccaggagaaaaaaaccataatctgggacttgcgtgtcattgttatttagtagttgaaaatgcttaaagattaaaatacaaaagcaaaactaaacattgtattaaatgttgcaccaacatttattctgatgatgcatacaatttggtgaaacccaacccaaatctcttctgaaaattacatcttttcgtagtacaatcagtatgcatatacagagaaaataatgatgtaatgaatattttgaatattatggtacaattctagctattccttagtaagtcaagacatcctgttctcagttttctagtttataggagctgatacttgccttcatggagcttagcagtggagctaagctggtattcattagggcctgtccaggagaagaaactgagagggaaaaaacccatgattcggtgtggttaccttacctattaacatatctgatgaaggaagtctggtggaaaatgaggtggaagctattgcgtggaaagagatattggattatatgtggattttattccactgggctattccttgctctcatttccaaggctaattaaaaatacttagctcaaagagagtgttctcctacaagagcagctgactgagaggcagacttatgagctatttacaaaatatatttcaatcaaaatcttagaaatacagtttttaaaaatcttctcctaaatatgtggttaattttctaactgctttgactatatgtttatactgggatcatatttctcgtatcttacccatatattgactacatgaggtcaaagtgtcagcaagttgtagctaaacatcagattcctaccctgaaagaggacctaagcagtaattgagaaagatttccagttttcttgctttaaccatggtttttccatatgttcttaataaacttatctccccctttttaattcccccagtggcaaaaatagaatgtttgaagtcattggagagaccctggagcacgatttcccaagctggatggcgaagatcttgagacagctttcaaaccctgggctggtcattgctgtcattttggtgatggtgtatgtgcttttcctcctcatagaaagagcctctgtgatgttcttcctggctgtttttacatttcagctttttcagctctctcactctccctaagggttctgctgtaacctatccaaattcaacactgattacatggtggtgagaggctaaaattcatgagccatattctgatcctattggatgtaattcacaggcatctgcatctgtctttgcttccccaggattataagatttgttcccaagtaaccacaataattatccataaacagctaaagcaagggaaacataaatgctaaatgctaaatctaatcagtacattgagcttccccccaacaacccggcctccacctctcgttccataaagcagatggcaatgaatatacagaaataatgatcctctaagttaatattccccttgggggccctatagactatattttaggggcaagggcttcaagggtcttaaaaatttcactgtccttgttgttagagggccgccaataactgtgtgttcacgataatagaatcagaggaccagaggatcttgggaagttcctgtagtctgtcccttcaaagtcagaagtgatttccaaaggggaacttgtcagatgacttttgttttcacataactttcattggcttctgactcttggccatcacagataaacttagattctaagtaaaagtacagatttgctgtggaagagccaaaagcagcgtccatctcttcctttcagtccctgagtgcctcctacatagaatgtctggagctgccacgactctcagtcagtgggtaaatattaaacagccccagggacactttaagaacaaagttgatgcaaaggatttggttcatttaaataaaggtaaaacaaggaaatctcagggagaaaactcccagtggtttgcagtaaatgagcagggattgtgacccagttattgtcgtgatcacaagccacataaagtagtgagggcaggtttatcttcttcaattttataacctaagaaattgatttacacaaagaaagtgattttccctagacaagagagagagtaaaatggtcatagaaggacctgaagcagatcctttcacagtaaatccagtgctcacttctttatactgcgaggctttctgtgagggagagctaataacctgtagggataattaaacagtaaatcagattaccattatatattacataaccttgataatggggtgctattaagaatctgatagtaaatctctggcacagatgcattagaaaatgacctactgaatgcagcatgtttcaccagatggcctttgaaacaattttctttctctacatgtccatgatacagtggcttctgagagcatgttaatcagtatcctgtggcctttgagagtcaaggccctttagtggtatgaatgaggtgttgtttaaaacacacacacacacacacacacaatgtaaatgtcagatttcgttaccatattcttacttgattaggagacatgtttatttttaagtgaaggagtggcattgttcaaatgccttaatccaaagatttagtaatcagtcctaagagggtttaaaaggaattcacactgcctttgtttcaggtactatttacacactgactcatttaattcccataacagctttgagaagctggcttcattaatcatactatcaataacacattgaaattctgccccaagtcaagtgactaagtggaactgaaactcatgtcttctccttatttcctacactcacttgcagcaccaaacagggatcagaatcagtgggaatttcagatgggctgaaagccacttgtccgaggtggtatagacccagggtcagcacacttttcctaattcgagggccagaggcaaattaggccaagaggcaaaattgaggctcttaattaagtaattactaataataaccgtttaaaagacagaaaaaccattcttaattcatgggccatacaaaacagtctggcagtcatcttcatcctgcaggacctagtttgctttgatctggacagcctggaggaaagctggccccatgcaaatgtcaaatagatgtactgaaaggttgattgtggctctgaggttctgatttaaaacccagattttagcttattactgagtatattttttcaaattctgagatctcatcttctatttttggggcccatacaattggcttagctttttattacctttaattagagaattgtactagtatgttgaatttcccccaatggattatattaaatcaacctggatggctttcgggtatctaagcagagttcaggttagttctctgcaggcagtttcattcctttggagactagaaaaagatttgtgaggaatacttatttaacgtgcattacaaggtagaaaatcatggtggataaatagagaattccagaacttgaaaggacttgtgaaatctttgagttcatcttccaaatccaggaacttttctaagaaaatccttataatacacaccacacacaaacacacacacacacaaacatttattgagcacctatttcatgccagatattgccctgcatgcatttatgtatgtaattttagtaaaactcccatcactcatgtaagagataaacaaactcagccaaaccgtatcaataattgtgttgctagcaccagatggttcataaaggatactgtctttcattttggggagtagaggaaatgtgttcaatatccagttatttgcagcaaagagtaatataagttaccttttttactgcatttcttctttgtttgtttgttcgttttgccttaagtgaagataagcatatttatttttacagaattgtctggctagaatttgccctttctagaatgtaaatgtcatttaaaatccaataatattcctttatacaacgttttctttttgagggagaaagaaatgcaaacaatacattctacggaaaaaattccatgttcattatctatgcctatgaggattacattcttagctgcaaaggccaaaggacgaaatttaaggcagaaagtcgttttcctttttgttcggcatgttccctaagctgcagtaggttttccattctctgggatgccattgccatccatttaaaatgctactttcaattataatttaaacttatgtgaatacatttccaggaaaaagctaatattaggcagtgtgaaatagcagacagaacaggctgtggatcaggagccttgggccccaactttccaacttcaccccagcttcatccctatgtcatcctgaatgtatctctttacctctctggacctcagcttttatctataagacaagagatttagagtagaagatagcttaatgttcattcccatgctgatatttcataatttacttaatgtaaatttaagaagtatcttggggaactgaaatataccttacactgtattttttttctttttaatttagtttggccatctattatctcaatgctactgccaagggccagaaggcagcgaatctggatctcaaaaagaagatgaaaatggtatgatacaatttatttcatagaaatattatctttattaatgtcaagcagtagaaaacactgagaaatctacttttttccccttattttttattgtgtagcaagctttggagaacaaaatgcgaaacaagaaaatggcagctgcacgagcaggttggagatacgtttatgtttgtaatgtttgtaatttttctttttctttttctttcttttttttttttttttgctttttctccattggatggtgagtggcattattgctgtgagcgagtcattccacaatccttaccttccacctttttagcccttctcaggcatcacatccagggtatttggttgttttctagtgggaggaaaaaaagagaaatgaaaatgtgggcatataaacttggcagtagtgatttttaaaagtgaccttgaaaatgcgcagaaaatgaagaaatcccccatatagtcgtctacaaacagcagatacaaatgcagatgctctcctgcccatgttgactattttcatacatggaaggatatggcaagaagatcccaagagggtcctctgggctttccaccactgattgccagaagccctttctaatccattaaactttctttttttaaaaacctctttattttttaaagtattagagtaaagccaacttctagttgccaaaattaataatatgctttgagttccccacggaaaggtgatacctaagacctttagtgaaaatcttttccaactttgtccttactcctaactttaaaactctttacattagtaggactgtttccccactgtaagtaataaaacactcaaattggtttaattgagaaagagtaatttattcgaccacacaaatgcagggaaatggtatgtatggcttcaggccactttcttttttctatatatatatatattttttaattatactttaagttctagggtacatgtgcacaacgtgcaggttagttacatatgtatacatgtgccatgttggtgtgctgcacccattaactcatcatttacattaggtatatgtcctaatgctagccctccctgctccccccaccgcacgacaggccccggtatgtgatgttccccttcctgtgtccaagtgttctcattgttcaatttccacctatgagtaagaacatgcggtgtttggttttttgtccttgcgatagtttgctgagaatgatggtttccagcttcatctatgtccctacaaaggacatgaactcatcattttttatggctgcatagtattccatggtgtatatgtgccacattttcttaatccagtctatcattgttggacatttgggttggttccaagtctttgctattgtgaatagtgccgcaataaacatacgtgtgcatgtgtctttatagcagcatgatttataatcctttgggtatatacccaaaggattttttttcttttttgagacctggtctggctctgtggcccaggctggagggcagtggtatgatctcggctcactgcagctccaacttcccaggctgaagtgatccttcctcctcagcctcctgagtagtggggacagcgcacaccaccatgcctggataatttttaattttttttttgaagtgaggtcttgctaagttgcccaggctgctctcaaagtcttgggctcaggtgatcttctctttttggcctcccaaagtgttgggattaaaagcatgaaccactgtgcccagcattcagggcactttttatcctaagtttagaacagagtcaggtctgagcccacctctctgtgaatctctgaagctaaactcctttcacattggctgacctttatggcagcaggaatggatgcagcaacttccaatgccatgtccttagactgtaaaacttctttcctagaaattcctcaacctctcctcctttcagattggccccatatgggtcatgtatccatccttgtgccagtcactgtgtctgagtatggtaagttactgaagtcagtcaggacccatccttgaagctgggattggtctgttttcctgacacatgtgaaatgcactggggaggtcacacctacctaagagaaggagaaaaggatgctgggtgtccccaaacaacaaatgttcaagacttggttttgttgccttctttatgcttagccttttttcttttccctctctctatctagcatgcataaatgtaaagttgaatgctgggtgctgaattagatgattacagtgatgtacagttatcagactagtttttaatgaaatttttaattttttaaatcaatactacatgtgtgcataatttagagttccatttagaatttcataattctataaggcttatcatgaaaaacagcatcttcttctgcctcctacaccagttttgctctcttctcctcccctgcactcaaataccctaagacaaacactttcaatttgttagttgatttttagatatttatctccaaattacctaattttgttgtaatttcttgactttttagttttaagtattatctcttaaaattattaactacaatggatataataattttaatagataatatttaaacgatttttatactcttgccccagtctttctatgcattctacctatgtagttatattattattttggttaggccagtatacattattatggacacacagtcttcacagctaagccaagtagtaaactatgatacttgtgcatactttaaaattttctcaggattcataattcataatttctctttttaaacattttcttatttttatatatgtttcagtgatgcatttaatttccaaatctctgctatttattgagttatactctcaatatattcagacatattgggttatctgtccatttcatttccttagagaaatctttcccagaatcttctgcacttctccaatttcaactagtgtgtgtctgggatacagctgtcatcctttcatttttcttcactgtcattcaacaggatctctgtcactttatcctgttttggatactgtgttttccattttccccaacttcctctcttttggtctgctcacattttgccagtaagaaagggtatgtgagaggcaaattttctgagaccatgcctatctgaaattgttcttctcttactctcccttttgactgatagtttgggggtcaaaaatactcatctaattatattagaaataatatcccttcaaaatagtattttttcagaggtttcccatgccttttagattccacaattgctcttgagtagtttaaagccattgtgattcttagtctttcttgagcaacttgtatttttgattatctgtttggttttccaatctggaaagttctagggtctccttatctgcatgttcagaatttcatgatggtgtatcttgcatggatctatttttattccttgtgtactcatcaatggacttttgctctttggttgaagggaattttcttgaattgtttacaaattctttccatccattttctgtttttttttttttcatgtagaatttctaatttatttttcatccttaaattccctttgtctctttgctttacctatgaacatttccttatctttaaattttaacatttctcttggccttttcacttttgctatcataattttagtttctgcaagctgttttgttctttaattcttcttttttaaacagcatgctgtttttgtttaatggctgcaatggcttgttttgtctttatgagaatattaataactctttttgatgtttctttgcctttgatagtctgttttctctaagctgttttgttcttctttctcccctgcttggtaattcccctgctttgtgaccctcagctcatatttcagggtaggatgcaaaggtgggtttcgaagctttaagcacatggatggggcttgtgggcagatcctcattgggggactctgcctgggctgccgctgaacccccatgtcagtatttttaggcttctcctcttaagctgatcagattcctcagaaaaattacttccgaactcctgcccagagagtaaagatttgcctggcaaatctgtagcacctgagtgggaaaaacaacacgggtggggctcagctttcaacctacaaatgctcacttagccccctctttttactgcggcactccttgtggtcttctaacccagaagcatctctgttttactctttttagaaaaaattattccagtcttctgccagattaaaggtagtgggggttggggagcaattattcatttgtaccaagtgaagccgatctcagactctaactgctgctgtttcgttttttaataacccccacccctttgccccaccaagcttgactgcttcttaacagctaaaacatcctctttgtattggttccttacttccagaggtacctgttgctgcaaattactgaacgtttcagagattttatgtgtaaattatgttgcttactgtctttttcctcccctggcttagcttttcagtttgttagaattgataagtcattatcattaatctgtctgctttccagcttctaaaattttgtcattgatgtctcttcccctattctccccctccttgcaggtttatgcaaccttctccatcttcctccccaaccccctcaaaatttcttgactgtcatgtttgtgaaagggtgaaagttcaattcaatgtatttacctccgcagtttaggcaaacctttgtatttcctacactaggagaacaatggttttatgtccatcttcactctgttcatcccacagtgcttacctgaggtattattttgaaatagagtctgggatggagtctaccttagtgagaatttattagaattgtttagtctctgcagaagatgaggtggttgaagcacatacatcacatatactagcagtgcttttgtataatttaatattatcaaattagtacttaagaatggaaaattctgacttataagatctaaattctaattaaggcttattgttatctttattgttttaaatgataatataatgctatagcatgctattcatctgatattttttccataatgtgtatggccacccagtaaacacctactgaatatctactgaaaaatgaggaactcttttgttggaaaaatataaaatattcatcacataagcaataatgtataaatgttacaaaaaagtagtacattcattctgccttgtttagaatatgtgaagcctttgcaaactaagaaacatggaaatattttgaacattaaaatggtaaatattatgggaaagtagagcacatttggacaatacagatttctggccacctcattcagaaccattaagcacactgaaagctacgtttttatttgcctcctgttcatcttctctctctctctccttgttttttttttttttttttttctgttttgtgaacagctgcagctgctggtcgccagtaataagtatcctgagagcccagaaaaggtacactttgccttgctgtttaaaagtaatgcaatatgtgaacgcccagagaacaagcactgtggaactgctattttcctgttctacccttgatggattttcaaggtcatgctggccaattaaggcatcatcagtcctacctgagcaacaagaatctaaactttattccaagtcagaaactgtttctgcagagccactctctcccctgctccatttcgtgactttttttttttttttaacaaattgagtttagaagtgagtgtaatccagcaatacagtttactggtttagttggtgggttaattaaaaaaaatttgctcatatgaactttcattttatatgtttcttttgcc

SEQ ID NO: 51 - protein, 352 aa, Homo sapiens
MFAAATKSFVKQVGDGGRLVPVPSLSEADKYQPLSLVVKKKRCFLFPRYKFTSTPFTLKDILLGDREISAGISSYQLLNYEDESDVSLYGRRGNHIVNDVGINVAGSDSIAVKASFGIVTKHEVEVSTLLKEITTRKINFDHSLIRQSRSSRKAVLCVVMESIRTTRQCSLSVHAGIRGEAMRFHFMDEQNPKGRDKAIVFPAHTTIAFSVFELFIYLDGAFDLCVTSVSKGGFEREETATFALLYRLRNILFERNRRVMDVISRSQLYLDDLFSDYYDKPLSMTDISLKEGTHIRVNLLNHNIPKGPCILCGMGNFKRETVYGCFQCSVDGQKYVRLHAVPCFDIWHKRMK

SEQ ID NO: 52 - DNA, 1059 bp, Homo sapiens
atgtttgctgctgctaccaagagctttgtcaagcaagttggagatggagggagattagttcctgttccaagcctcagtgaagctgacaaatatcaacctctaagtctggtggtaaaaaagaagcgatgctttctgtttcctagatataaatttacttcaacaccttttacactgaaagatattctcctaggagacagagaaatttcagctggtatttcatcttatcaattactgaattatgaagatgaatcagatgtttcactctatggaaggcgaggtaaccatattgtaaatgacgttgggattaacgttgctggatcagattccattgcagtgaaagcttcatttggtatagtaaccaaacatgaagtggaagtatcaacattactcaaagaaattactacacgaaaaattaactttgaccacagcttgatacgtcagtcaaggagcagcagaaaggcagtattgtgtgtggtcatggagagcatccgaaccacacgacagtgctcactgtctgtgcatgctggaattcgaggggaagcaatgcggtttcactttatggatgaacagaatcccaagggaagggacaaagctattgttttcccagcacatacaaccatagctttcagtgtttttgaactcttcatatacctggatggtgcctttgacctttgtgtcacttcagtgtcaaaaggaggatttgaaagggaagaaacggcaacatttgcactgctgtacaggttgagaaatatcctatttgaaagaaatagaagagtgatggatgtcatttctcgttcacagctttacttggatgatcttttttctgactactatgacaaacctctcagcatgactgatatttcactcaaagaagggacccatatccgagttaacttacttaatcacaacattcccaaagggccttgcatactctgtggaatggggaacttcaaaagggagacagtttatgggtgctttcagtgttctgttgatggtcagaagtatgtgagacttcatgcagttccttgttttgatatttggcacaagaggatgaaataa

SEQ ID NO: 53 - protein, 355 aa, Homo sapiens
MAFAWDAAPLSFVKQVGDGGRLVPVPSLSEADKYQPLSLVVKKKRCFLFPRYKFTSTPFTLKDILLGDREISAGISSYQLLNYEDESDVSLYGRRGNHIVNDVGINVAGSDSIAVKASFGIVTKHEVEVSTLLKEITTRKINFDHSLIRQSRSSRKAVLCVVMESIRTTRQCSLSVHAGIRGEAMRFHFMDEQNPKGRDKAIVFPAHTTIAFSVFELFIYLDGAFDLCVTSVSKGGFEREETATFALLYRLRNILFERNRRVMDVISRSQLYLDDLFSDYYDKPLSMTDISLKEGTHIRVNLLNHNIPKGPCILCGMGNFKRETVYGCFQCSVDGQKYVRLHAVPCFDIWHKRMK

SEQ ID NO: 54 - DNA, 1068 bp, Homo sapiens
atggcgtttgcctgggatgcagcacctttgagctttgtcaagcaagttggagatggagggagattagttcctgttccaagcctcagtgaagctgacaaatatcaacctctaagtctggtggtaaaaaagaagcgatgctttctgtttcctagatataaatttacttcaacaccttttacactgaaagatattctcctaggagacagagaaatttcagctggtatttcatcttatcaattactgaattatgaagatgaatcagatgtttcactctatggaaggcgaggtaaccatattgtaaatgacgttgggattaacgttgctggatcagattccattgcagtgaaagcttcatttggtatagtaaccaaacatgaagtggaagtatcaacattactcaaagaaattactacacgaaaaattaactttgaccacagcttgatacgtcagtcaaggagcagcagaaaggcagtattgtgtgtggtcatggagagcatccgaaccacacgacagtgctcactgtctgtgcatgctggaattcgaggggaagcaatgcggtttcactttatggatgaacagaatcccaagggaagggacaaagctattgttttcccagcacatacaaccatagctttcagtgtttttgaactcttcatatacctggatggtgcctttgacctttgtgtcacttcagtgtcaaaaggaggatttgaaagggaagaaacggcaacatttgcactgctgtacaggttgagaaatatcctatttgaaagaaatagaagagtgatggatgtcatttctcgttcacagctttacttggatgatcttttttctgactactatgacaaacctctcagcatgactgatatttcactcaaagaagggacccatatccgagttaacttacttaatcacaacattcccaaagggccttgcatactctgtggaatggggaacttcaaaagggagacagtttatgggtgctttcagtgttctgttgatggtcagaagtatgtgagacttcatgcagttccttgttttgatatttggcacaagaggatgaaataa

SEQ ID NO: 55 - protein, 354 aa, Homo sapiens
MYVYRLLSITVLMDILLEGLHSQYFTIYELRITPMAKHFSTQSFVKQVGDGGRLVPVPSLSEADKYQPLSLVVKKKRCFLFPRYKFTSTPFTLKDILLGDREISAGISSYQLLNYEDESDVSLYGRRGNHIVNDVGINVAGSDSIAVKASFGIVTKHEVEVSTLLKEITTRKINFDHSLIRQSRSSRKAVLCVVMESIRTTRQCSLSVHAGIRGEAMRFHFMDEQNPKGRDKAIVFPAHTTIAFSVFELFIYLDGAFDRRVMDVISRSQLYLDDLFSDYYDKPLSMTDISLKEGTHIRVNLLNHNIPKGPCILCGMGNFKRETVYGCFQCSVDGQKYVRLHAVPCFDIWHKRMK

SEQ ID NO: 56 - DNA, 1065 bp, Homo sapiens
atgtatgtatatagattactatccatcactgttttaatggatatcttattggaagggctacatagtcagtatttcacaatatatgaactccgcataacacctatggcaaaacatttcagcactcagagctttgtcaagcaagttggagatggagggagattagttcctgttccaagcctcagtgaagctgacaaatatcaacctctaagtctggtggtaaaaaagaagcgatgctttctgtttcctagatataaatttacttcaacaccttttacactgaaagatattctcctaggagacagagaaatttcagctggtatttcatcttatcaattactgaattatgaagatgaatcagatgtttcactctatggaaggcgaggtaaccatattgtaaatgacgttgggattaacgttgctggatcagattccattgcagtgaaagcttcatttggtatagtaaccaaacatgaagtggaagtatcaacattactcaaagaaattactacacgaaaaattaactttgaccacagcttgatacgtcagtcaaggagcagcagaaaggcagtattgtgtgtggtcatggagagcatccgaaccacacgacagtgctcactgtctgtgcatgctggaattcgaggggaagcaatgcggtttcactttatggatgaacagaatcccaagggaagggacaaagctattgttttcccagcacatacaaccatagctttcagtgtttttgaactcttcatatacctggatggtgcctttgatagaagagtgatggatgtcatttctcgttcacagctttacttggatgatcttttttctgactactatgacaaacctctcagcatgactgatatttcactcaaagaagggacccatatccgagttaacttacttaatcacaacattcccaaagggccttgcatactctgtggaatggggaacttcaaaagggagacagtttatgggtgctttcagtgttctgttgatggtcagaagtatgtgagacttcatgcagttccttgttttgatatttggcacaagaggatgaaataa

SEQ ID NO: 57 - protein, 193 aa, Homo sapiens
MESIRTTRQCSLSVHAGIRGEAMRFHFMDEQNPKGRDKAIVFPAHTTIAFSVFELFIYLDGAFDLCVTSVSKGGFEREETATFALLYRLRNILFERNRRVMDVISRSQLYLDDLFSDYYDKPLSMTDISLKEGTHIRVNLLNHNIPKGPCILCGMGNFKRETVYGCFQCSVDGQKYVRLHAVPCFDIWHKRMK

SEQ ID NO: 58 - DNA, 582 bp, Homo sapiens
atggagagcatccgaaccacacgacagtgctcactgtctgtgcatgctggaattcgaggggaagcaatgcggtttcactttatggatgaacagaatcccaagggaagggacaaagctattgttttcccagcacatacaaccatagctttcagtgtttttgaactcttcatatacctggatggtgcctttgacctttgtgtcacttcagtgtcaaaaggaggatttgaaagggaagaaacggcaacatttgcactgctgtacaggttgagaaatatcctatttgaaagaaatagaagagtgatggatgtcatttctcgttcacagctttacttggatgatcttttttctgactactatgacaaacctctcagcatgactgatatttcactcaaagaagggacccatatccgagttaacttacttaatcacaacattcccaaagggccttgcatactctgtggaatggggaacttcaaaagggagacagtttatgggtgctttcagtgttctgttgatggtcagaagtatgtgagacttcatgcagttccttgttttgatatttggcacaagaggatgaaataa

SEQ ID NO: 59 - protein, 193 aa, Homo sapiens; identical to SEQ ID NO: 57

SEQ ID NO: 60 - DNA, 582 bp, Homo sapiens; identical to SEQ ID NO: 58

SEQ ID NO: 61 - protein, 352 aa, Homo sapiens; identical to SEQ ID NO: 51

SEQ ID NO: 62 - DNA, 1059 bp, Homo sapiens; identical to SEQ ID NO: 52

SEQ ID NO: 63 - DNA, 10131 bp, Homo sapiens
tttcttgccgggagagagggattagagggattgtccggcgtgggtctagggtcgttgaggcctaaagttaagcctttgtggggaggacggattgggggctgggtcactttaagaaaaagattctaaaattacgaaggcagaattccagggagtctcccgggcctggtcctgaagcttgagaccccggatatatacgctccagggggctgcggtgcgctcttcgggtccccgagccctgtgtttaggaacacgcggggacgtccaaacacccgctcctctcccgccgggcgggctcctttgtcttctgggctttcgtcgcgagatggaacgctgggtcagtgcatcccagcaaaacacgttaggagtaaacgaaggcctttccggggacctgggtagtcggttgtaatggcgtttgcctgggatgcagcacctttggtgggccattagatgacgtgtcgcttctccaggggcttgctaggcactagcagaaatgctcccctgtgcttactcggtgttatggaagattgcttgcacaatgctattcgtacgaaaggatattattaaaagtgatttatgggcgggcgcggtggctcacgcctgtaatcccagcactttaggaggccgaggctggcggatcgcctgaagtaagcagttcgagaccagcctggccaacatggtgaaaccctgtctctactaaaaatacaaaaattagccgggcgtggtggcatgcgcctgtaatcccagctactcgggaggctaaagcaggagaatcgcttgaacccgggaggcaaatgttgcagtgagccgagatcgcgccactgcactccagcctgggcgacagagtcagactccctctcaaaaaaaaaaaaaaaaaaaaaagcgatttgttgttttgttagcatgtaagccctggatgcttgaaacaagtgaaagatgttcagaatctaatcaaattatatcatctgatgctttaattagagcctattctctcttcctctccgtctatatatgtatgtatatagattactatccatcactgttttaatggatatcttattggaagggctacatagtcagtatttcacaatatatgaactccgcataacacctatggcaaaacatttcagcactcaggtaaaattcattttttgccacaaaattacttaaaaacaggccagaactttatatagctcttgttaaaggttaagtagctgggataataatgaaacaaaaagatgcagcaggactccatttcaaagagagagagtctgtgtgcccaacttcagagtaagaaaccactaggtaatagtttatatagttacttatatgtaatgtggctttattttttaaataaagatttgcatataattgtttatatctgtgaatttatatttaatattaaacacagttttgtaagcatataagatggaaaatgaatgaaatgctcaatcaatgagctgtatgccatgaggattcaaaacagcactttggtgttgccaaaattccggtggtggacttgtgaaggaattccctttggactaggtccactgtagattgtatccgggactatcgttagtgcctaaattgcattgcttcccacagcactatatgcttcccttaaaattggcccattgccagtggcaaatcactatctactgtgatccttatcatagacattggtcatatttttacgttattagttttctgtgtatattttagtgctatagcctgccattccaagttaaacatgctcttagcatatcattttacaccgttgatctataattcattacctgagcacatgagcagaggcagggaattatacagtggtaaactacttggtgaaaccatgctttgtatttttaagatgtataattatatttaaaaacaagcaatgcttaattttgtgcctgattttcctctttaaaaatggatttatctgggggttgcagttgatgacgttttgattttaatatgtttgctgctgctaccaagagctttgtcaagcaagttggagatggagggagattagttcctgttccaagcctcagtgaagctgacaaatatcaacctctaagtctggtggtaaaaaagaagcgatgctttctgtttcctagatataaatttacttcaacaccttttacactgaaagatattctcctaggagacagagaaatttcagctggtaagtttaaatgtttgggagtgccaactcattcatctgtattattggcaacctaaacataggtcatatatgctacttatgttagtaatacacattttcaatgattaaagcaacttttattatgatgttagtgtaataacattattaagattaacaatgccaaaagtttgtataatatcaaatctcttattggtcaaataattttcaaatctatcaattattttataaattgttttaaccaaatcaacttagaatatgacatatttcttcatctataaaatgggatattatttgggcttacctatgttacatggtcaaatgagatgaaaataatttgtatttattttttacaattcaattattacaattggtaaactgaaatgtattgaagggtaggttatataataagctgatattttgatgagttactacttataaacgcttattttttcttttaattgcccggtggatcttgatgcttaagaagttctgttggctgaatagaaaatttgagttccttttaagaattctggctatgtgtttctttttgttgtaagattaattgaattactactttaagtcttggtgagtcatgttgcctttctctaacatttgggtatttgagtcttcaattgttaatttaacatgttactatatataatctacataagataaagatgtttaaaaaatactgagtttcttcttataaaggtatttcatcttatcaattactgaattatgaagatgaatcagatgtttcactctatggaaggcgaggtaaccatattgtaaatgacgttgggattaacgttgctggatcagattccattgcagtgaaagcttcatttggtatagtaaccaaacatgaagtggaagtatcaacattactcaaagaaattactacacggtcagtataataatcctaatatatttcagtgttttcattaaatactttaggtatataaacttcattacaaagaatgcttaaaacattgaggttgtattttactagtgtaatttgctagatatgtttgaaatacattggtagtatatccaaactttgaataaggatagatatcaaaaatcacttggctgaagtcagagacctcagggccccagatcaaggagctaactgatgaagaggcagagaggctgcagctagagattgaccagaaataggatgcagagaatcatgaggcccagatcaagaatggcagccttgactccccagggaagcagaagactgaggaagatgaggaggaggaagatgagaaggacaaaggaaaactgaagcccaacctaggcaacagggcagacctgcctgattaccgctggaccaagaccctgtcggagctggacctggcggtccctttctgtgtggacttccagctgaaagggaaggacgtggtggtggcatccaacggcggcacctccaggtggggctcaaggggcagccagcgatcatcgatggggagctctacaacgaagtgaaggcggaggagagctcgtggctcattgaggacggcaaggtggtgactgtgcatctggagaagatcaagaagatggagtggtggagccgcttggtgtccagtgaccctgagatcaataccaagaagattaaccctgagaattccaagctgtcagacctggacagtgagactcacatcatggtggaaaagacaatctatgaccagtaacagaagtccatggggctgccaacctcagacgaacagaagaaacaggagattctgaagaagttcatggatcagcatccggagatggatttttccaaggctaaattcaactagcccctgtttttccctccctgaactcttggggctgagctgcaaccacccaactttctttcccactcttctctgggacttgtgggcctcagggcttggggcaggcatgggactggcccaggcacacaggtcccagggcatcaggagaaaggctggggcttggggtcttgtcctccccagttggcctactgttacacattaaaatgatttgcccagctaaaaaaaaaaaaaaaccacttggcttaaacaaaacttttaattgttccacaaaattactttggctctacacacatttgcttaattattagatttaaataatacagcaatctgtctgcaacaaatagagtccccttcaacagactttcaacagacagagtgaaacattctgcataagcatgttttaagaaaatagagaggagagacaaattattacatttcttttgggtgtattttctgactattaggattgccttgatttactattaggtgaactatgaatgaataacacatgatagcaaaaaatgtatttgattatgtgtaattagatgttatagagtcttgtgaatgtatcttctttattttagaaaaattaactttgaccacagcttgatacgtcagtcaaggagcagcagaaaggcagtattgtgtgtggtcatggagagcatccgaaccacacgacagtgctcactgtctgtgcatgctggaattcgaggggaagcaatgcgggtaaaccacacttgttgggttctcttactaactaaagtgttgccatgggaatttttttaagtattgaatttctagtcaggcttgtgtattttgtgaaatgttctgatgaaagagctgcagttgtataggattttgcacagcaatgtctgttctagaatatgaaaaaaaaaaacaaatcttgggattctaaacatgtgtaatataatgcaaaaacagtaatccttgtgaaattacgtgcatactggagtccctcaagttactatttaagtgttgttttaagaataaaaattgagtgagttgaattgattttatttttaagtgatacagtttttgactgggcacagtggctcacgcctgtaatcctagcattttgggaggccgaggtgggcggatcacttgcagtcaggagttggagatcaagttgggcaacacagagaaaccccatctctactgaaaatacaaaaattagccaggtgtggtggtacacccctgtaatcccaagccactcaggaagctgaggcacaagaatcacttgaacctgggaggtggaggttgcagtgagccgagattgtgccattgcactctaacctgggtggcagagtgagactccgtctcaaaaaaacaaaacaaaacaaaaaccccaaccaaaaaaaaaatgtgtaacataatgcaaaaacagtaatccttgtgaaattacatgcatactggagtccctcatattactatttaagtgctgttttaagaataaaaattgagtgcttaagttgaattgatttaagtgatagagtttttacactttgaattttttaaagctgaatttatagattttttttttgagacggagtctcgctctgtccccgaggctggagtgcagtggcgcgatcttggctcactgcaaactccgcctcccgggttcatgccattcttctgcctcagcctcccgagtagctgggactacaggcacctgccaccacgcccggcagtgttatccaggatggtttcgatctcctgacctcgtgatccgctagcctcggcctcccaaaatgctgggattacaggtgtgagccaccgcgcctggcctgaatttatatttttatattcaaatagtttttcaaagttaatattatcaatggccatacatgctttattcaaggttagttaaatcctttaaaaaatattagcggcaaggtgcagtggatcatgcctgtaatcccagtgcttaggaagactgagataggaagacagcttgggaccaggagttcaagaccaacttgagcaaaataatgagaccttgtctctacaaaaaataaaagaattagctggttgtggtggcacatgcctatagtcccagctactcggaaggctgaggcagggggctgcctgcggggtttgggtcattgtcttttagaatttgggaggctttgaaaagccgtgcttttgtgctggggaagatgtagcagtctcttctccaaaccacccatttgccttcggacttctctggggccagcagccatccaactaggggcccggggccacgggctcagctgacgaccatgggcttcgcgtccaaccagcagtttgcaggttcgagctcaggacttggcggggacaccttaggatgcaggagtggccaggagttcaaggttacagtaggctatgattgtgccactgctctccagcctgggtgacagagagagaccctgtctctgaaaaaaaaattggaaaagtatctgtgtttaattttcagctcaattatgatattgtttatctttgtcattcagtgacacctaataatgacttgattggattaaaaccaattgttagaaagatagggttcaaggataatcttttcaagtctttgcaaataaaagttattttcgcatattcagctgcctgtcaaattctgattaacattggatcatttttgaggcacaaactgaaacatttacttgattgttagcgattgctttagaaagctactaaaagctctggagggctttggaatggtagacaggctaggctgaaaactttaactctggcactgctttctaagatttcctgttaaaaaaaaaaaaaaggcttctgctccagagcattatggttgtggtagcactaatcatgggctgtaataccaaagtaagtgaaaagtgcagaggtatttcctaatatagaccaggagtttctgttggaccaattggatctctgctataaaaaatggtttaattcaagcagaataatcctttacttgggaattttttgttttgtttttggtaggattataggaaatgtttcatttctccaaaaagctatccttacatgttatgatccttaattatgttatttatttattcaatatagtttcactttatggatgaacagaatcccaagggaagggacaaagctattgttttcccagcacatacaaccatagctttcagtgtttttgaactcttcatatacctggatggtgcctttggtgagttaagggtctgcatgaaatacaaatgattatatttttaaggagcattcattagggcatgtgctctctctctctcttttctctcatttctcgtgtctaacaattatagaagatgctctcagcactgtcaatcttatgctttggcaaaatagctgagaaagaccctccgttcgctgcttccccattccacttttctgcttcttggtgaaggttgtaaactctccactaccccatttaaaattataaataagagctaaaatgccatctactgacaaagtattccttagcttacatggggagataataaatgaccttcttataggtagtttttgatggtggcaaacagaggagtaggtagatagtaggatgcctgaagtgttaggatgcccaaaccagggcctctaaagacagcttttcttacttcagttttacttatcatagacccagcttccccttgcactcttcctaaaaaataactttaaaaagtgaaaatacttcctccaaaattgtcaccttgtataatacctaagtgcagctcactttaggtctctacatttcacaggtctttaaggtctgttggccaactggaacaagtccaggtgtagcccaagggatcaggaaaggcagcccctagccatggtaatttacaaatgtttttagacctgttcttgttcatttctgcaattttgtaggaggagggaatagggagtccagaaacaaaacaaaactacatgttaagtaaattgtctttttaaaaaatatttttaatttttgtggctatatagtagattatatatatatttatgtatgggatacatgaggtattttgatacgggcatacagtgcataataatcacatcatggaaaatggggtatccatcccctcaagcatttatcctttgtgttacaaacaatccaattatactcttttagttatttaaaaatgtacaaattctcagtctaagatggagaaaaaactgtacaattacattattttgactgtagtcaccctattatgcttccaaatactaggtcttattaagtaaattctaattggataactttaggtttttacagttttattgatggttgggaggaatgtaaatggactgatatatccacaagaatttaaaatatatatataatttggacttccacttctaggaatttatcctacagatatatttacacatatatgaaatgatatgagtgcaagtatattcagtcctcaataacaagagattggaaacaacattaaggagactaaataatggtgcatccttgcaagagaatactatgaagccaataagaatataatacttttaatagatatttttcaagagctgagtataatatgtaactatttgggcataaataattttatacacatacatgtatatatgcatctttctttatgcttataaaatatatggagtatttctggaagcaaacataagaaacttaaaccacgggtgcccctaagcccctgaggtagaagactgtggctggatacagggtgggccagagacctatttgtcactgtatctcctttctgtatgaattttgtaccatgtgaatgttaccttttccaaaagtatgtaaaagtcaacttttaaaaacaatacaatgaatgatttgtactagaattcatcaccccatcaaacaataaaatatgaattattcaagttataacatcttctaacaattttttttgtagacctttgtgtcacttcagtgtcaaaaggaggatttgaaagggaagaaacggcaacatttgcactgctgtacaggttgagaaatatcctatttgaaagaagtatgtttattgaagagtactgtgaatgtcttttttttttctttcctggcttaacacatgaggttttctattcagtaatctcatctgttaaggaaaaatttaaatttaaaagcctggctggtatggtggctcatgcctataatcccagcactttgggaggccagggcaggcagattgctagcactcagaagtttgaaacacttgggcaatgtgagaaaaccccatctgtacaaagaatacaaaagaaaaaaaattagttggttgcagtggtgtgcacctgtagtcccagctacttgagaggctgaggtaggaggatcacttgagcgtgggaggcggaggttgtagtaagtggagattgtgccactgccctccagcttgggtgacagagccagaccctgtctcaaaaaaaaaaaaaaaaaaaaaaaagccaaattatttcatgactagtggattcacatatttattaatgctgtttgcattatgtatttttcattttcacttctaacacatttcttttctgtttttgtccttttagatagaagagtgatggatgtcatttctcgttcacagctttacttggatgatcttttttctgactactatgacaaacctctcagcatgactgatatttcactcaaagaagggacccatatccgagttaacttacttaatcacaacattcccaaagggccttgcatactctgtggaatggggaacttcaaaagggagacagtttatgggtgctttcagtgttctgttgatggtcagaagtatgtgagacttcatgcagttccttgttttgatatttggcacaagaggatgaaataaaatgaaaaatgaatacaccgtgttggtgttttaggtgcagttgtgccacaaaccttccctaaattatctaggtttgctttgatgaattaaattaaaatgagaaaagcaaaaagaaattaacctgtctgggtatcatattccctatctataaagtagcaattataacagtagtgtctatttcttaagttgtcatgaaaattaataacattgtttatatcaaaaaagatttacatataaaattcagagattatgaatcatgccagtcactttagaatcatttttgggatgtagt

SEQ ID NO: 64 - protein, 641 aa, Homo sapiens
MAKAAAIGIDLGTTYSCVGVFQHGKVEIIANDQGNRTTPSYVAFTDTERLIGDAAKNQVALNPQNTVFDAKRLIGRKFGDPVVQSDMKHWPFQVINDGDKPKVQVSYKGETKAFYPEEISSMVLTKMKEIAEAYLGYPVTNAVITVPAYFNDSQRQATKDAGVIAGLNVLRIINEPTAAAIAYGLDRTGKGERNVLIFDLGGGTFDVSILTIDDGIFEVKATAGDTHLGGEDFDNRLVNHFVEEFKRKHKKDISQNKRAVRRLRTACERAKRTLSSSTQASLEIDSLFEGIDFYTSITRARFEELCSDLFRSTLEPVEKALRDAKLDKAQIHDLVLVGGSTRIPKVQKLLQDFFNGRDLNKSINPDEAVAYGAAVQAAILMGDKSENVQDLLLLDVAPLSLGLETAGGVMTALIKRNSTIPTKQTQIFTTYSDNQPGVLIQVYEGERAMTKDNNLLGRFELSGIPPAPRGVPQIEVTFDIDANGILNVTATDKSTGKANKITITNDKGRLSKEEIERMVQEAEKYKAEDEVQRERVSAKNALESYAFNMKSAVEDEGLKGKISEADKKKVLDKCQEVISWLDANTLAEKDEFEHKRKELEQVCNPIISGLYQGAGGPGPGGFGAQGPKGGSGSGPTIEEVD

SEQ ID NO: 65 - DNA, 1926 bp, Homo sapiens
atggccaaagccgcggcgatcggcatcgacctgggcaccacctactcctgcgtgggggtgttccaacacggcaaggtggagatcatcgccaacgaccagggcaaccgcaccacccccagctacgtggccttcacggacaccgagcggctcatcggggatgcggccaagaaccaggtggcgctgaacccgcagaacaccgtgtttgacgcgaagcggctgatcggccgcaagttcggcgacccggtggtgcagtcggacatgaagcactggcctttccaggtgatcaacgacggagacaagcccaaggtgcaggtgagctacaagggggagaccaaggcattctaccccgaggagatctcgtccatggtgctgaccaagatgaaggagatcgccgaggcgtacctgggctacccggtgaccaacgcggtgatcaccgtgccggcctacttcaacgactcgcagcgccaggccaccaaggatgcgggtgtgatcgcggggctcaacgtgctgcggatcatcaacgagcccacggccgccgccatcgcctacggcctggacagaacgggcaagggggagcgcaacgtgctcatctttgacctgggcgggggcaccttcgacgtgtccatcctgacgatcgacgacggcatcttcgaggtgaaggccacggccggggacacccacctgggtggggaggactttgacaacaggctggtgaaccacttcgtggaggagttcaagagaaaacacaagaaggacatcagccagaacaagcgagccgtgaggcggctgcgcaccgcctgcgagagggccaagaggaccctgtcgtccagcacccaggccagcctggagatcgactccctgtttgagggcatcgacttctacacgtccatcaccagggcgaggttcgaggagctgtgctccgacctgttccgaagcaccctggagcccgtggagaaggctctgcgcgacgccaagctggacaaggcccagattcacgacctggtcctggtcgggggctccacccgcatccccaaggtgcagaagctgctgcaggacttcttcaacgggcgcgacctgaacaagagcatcaaccccgacgaggctgtggcctacggggcggcggtgcaggcggccatcctgatgggggacaagtccgagaacgtgcaggacctgctgctgctggacgtggctcccctgtcgctggggctggagacggccggaggcgtgatgactgccctgatcaagcgcaactccaccatccccaccaagcagacgcagatcttcaccacctactccgacaaccaacccggggtgctgatccaggtgtacgagggcgagagggccatgacgaaagacaacaatctgttggggcgcttcgagctgagcggcatccctccggcccccaggggcgtgccccagatcgaggtgaccttcgacatcgatgccaacggcatcctgaacgtcacggccacggacaagagcaccggcaaggccaacaagatcaccatcaccaacgacaagggccgcctgagcaaggaggagatcgagcgcatggtgcaggaggcggagaagtacaaagcggaggacgaggtgcagcgcgagagggtgtcagccaagaacgccctggagtcctacgccttcaacatgaagagcgccgtggaggatgaggggctcaagggcaagatcagcgaggcggacaagaagaaggttctggacaagtgtcaagaggtcatctcgtggctggacgccaacaccttggccgagaaggacgagtttgagcacaagaggaaggagctggagcaggtgtgtaaccccatcatcagcggactgtaccagggtgccggtggtcccgggcctgggggcttcggggctcagggtcccaagggagggtctgggtcaggccccaccattgaggaggtggattag

SEQ ID NO: 66 - protein, 641 aa, Mus musculus
MAKNTAIGIDLGTTYSCVGVFQHGKVEIIANDQGNRTTPSYVAFTDTERLIGDAAKNQVALNPQNTVFDAKRLIGRKFGDAVVQSDMKHWPFQVVNDGDKPKVQVNYKGESRSFFPEEISSMVLTKMKEIAEAYLGHPVTNAVITVPAYFNDSQRQATKDAGVIAGLNVLRIINEPTAAAIAYGLDRTGKGERNVLIFDLGGGTFDVSILTIDDGIFEVKATAGDTHLGGEDFDNRLVSHFVEEFKRKHKKDISQNKRAVRRLRTACERAKRTLSSSTQASLEIDSLFEGIDFYTSITRARFEELCSDLFRGTLEPVEKALRDAKMDKAQIHDLVLVGGSTRIPKVQKLLQDFFNGRDLNKSINPDEAVAYGAAVQAAILMGDKSENVQDLLLLDVAPLSLGLETAGGVMTALIKRNSTIPTKQTQTFTTYSDNQPGVLIQVYEGERAMTRDNNLLGRFELSGIPPAPRGVPQIEVTFDIDANGILNVTATDKSTGKANKITITNDKGRLSKEEIERMVQEAERYKAEDEVQRDRVAAKNALESYAFNMKSAVEDEGLKGKLSEADKKKVLDKCQEVISWLDSNTLADKEEFVHKREELERVCSPIISGLYQGAGAPGAGGFGAQAPKGASGSGPTIEEVD

SEQ ID NO: 67 - DNA, 1927 bp, Mus musculus
atggccaagaacacggcgatcggcatcgacctgggcaccacctactcgtgcgtgggcgtgttccagcacggcaaggtggagatcatcgccaacgaccagggcaaccgcacgacccccagctacgtggccttcaccgacaccgagcgcctcatcggagacgccgccaagaaccaggtggcgctgaacccgcagaacaccgtgttcgacgcgaagcggctgatcggccgcaagttcggcgatgcggtggtgcagtccgacatgaagcactggcccttccaggtggtgaacgacggcgacaagcccaaggtgcaggtgaactacaagggcgagagccggtcgttcttcccggaggagatctcgtccatggtgctgacgaagatgaaggagatcgctgaggcgtacctgggccacccggtgaccaacgcggtgatcacggtgcccgcctacttcaacgactctcagcggcaggccaccaaggacgcgggcgtgatcgccggtctaaacgtgctgcggatcatcaacgagcccacggcggccgccatcgcctacgggctggaccggaccggcaagggcgagcgcaacgtgctcatcttcgacctggggggcggcacgttcgacgtgtccatcctgacgatcgacgacggcatcttcgaggtgaaggccacggcgggcgacacgcacctgggaggggaggacttcgacaaccggctggtgagccacttcgtggaggagttcaagaggaagcacaagaaggacatcagccagaacaagcgcgcggtgcggcggctgcgcactgcgtgtgagagggccaagaggacgctgtcgtccagcacccaggccagcctggagatcgactctctgttcgagggcatcgacttctacacatccatcacgcgggcgcggttcgaagagctgtgctcagacctgttccgcggcacgctggagcccgtggagaaggccctgcgcgacgccaagatggacaaggcgcagatccacgacctggtgctggtgggcggctcgacgcgcatccccaaggtgcagaagctgctgcaggacttcttcaacgggcgcgacctgaacaagagcatcaacccggacgaggcggtggcctacggggcggcggtgcaggcggccatcctgatgggggacaagtcggagaacgtgcaggacctgctgctgctggacgtggcgccgctgtcgctgggcctggagactgcgggcggcgtgatgacggcgctcatcaagcgcaactccaccatccccaccaagcagacgcagaccttcaccacctactcggacaaccagcccggggtgctgatccaggtgtacgagggcgagagggccatgacgcgcgacaacaacctgctggggcgcttcgaactgagcggcatcccgccggcgcccaggggcgtgccacagatcgaggtgaccttcgacatcgacgccaacggcatcctgaacgtcacggccaccgacaagagcaccggcaaggccaacaagatcaccatcaccaacgacaagggccgcctgagcaaggaggagatcgagcgcatggtgcaggaggccgagcgctacaaggccgaggacgaggtgcagcgcgacagggtggccgccaagaacgcgctcgaatcctatgccttcaacatgaagagcgccgtggaggacgagggtctcaagggcaagctcagcgaggctgacaagaagaaggtgctggacaagtgccaggaggtcatctcctggctggactccaacacgctggccgacaaggaggagttcgtgcacaagcgggaggagctggagcgggtgtgcagccccatcatcagtgggctgtaccagggtgcgggtgctcctggggctgggggcttcggggcccaggcgcccaagggagcctctggctcaggacccaccatcgaggaggtggattaga

SEQ ID NO: 68 - protein, 641 aa, Macaca mulatta; identical to SEQ ID NO: 64

SEQ ID NO: 69 - protein, 641 aa, Rattus rattus
MAKKTAIGIDLGTTYSCVGVFQHGKVEIIANDQGNRTTPSYVAFTDTERLIGDAAKNQVALNPQNTVFDAKRLIGRKFGDPVVQSDMKHWPFQVVNDGDKPKVQVNYKGENRSFYPEEISSMVLTKMKEIAEAYLGHPVTNAVITVPAYFNDSQRQATKDAGVIAGLNVLRIINEPTAAAIAYGLDRTGKGERNVLIFDLGGGTFDVSILTIDDGIFEVKATAGDTHLGGEDFDNRLVSHFVEEFKRKHKKDISQNKRAVRRLRTACERAKRTLSSSTQASLEIDSLFEGIDFYTSITRARFEELCSDLFRGTLEPVEKALRDAKLDKAQIHDLVLVGGSTRIPKVQKLLQDFFNGRDLNKSINPDEAVAYGAAVQAAILMGDKSENVQDLLLLDVAPLSLGLETAGGVMTALIKRNSTIPTKQTQTFTTYSDNQPGVLIQVYEGERAMTRDNNLLGRFELSGIPPAPRGVPQIEVTFDIDANGILNVTATDKSTGKANKITITNDKGRLSKEEIERMVQEAERYKAEDEVQRERVAAKNALESYAFNMKSAVEDEGLKGKISEADKKKVLDKCQEVISWLDSNTLAEKEEFVHKREELERVCNPIISGLYQGAGAPGAGGFGAQAPKGGSGSGPTIEEVD

SEQ ID NO: 70 - protein, 641 aa, Bos taurus
MAKNMAIGIDLGTTYSCVGVFQHGKVEIIANDQGNRTTPSYVAFTDTERLIGDAAKNQVALNPQNTVFDAKRLIGRKFGDPVVQSDMKHWPFRVINDGDKPKVQVSYKGETKAFYPEEISSMVLTKMKEIAEAYLGHPVTNAVITVPAYFNDSQRQATKDAGVIAGLNVLRIINEPTAAAIAYGLDRTGKGERNVLIFDLGGGTFDVSILTIDDGIFEVKATAGDTHLGGEDFDNRLVNHFVEEFKRKHKKDISQNKRAVRRLRTACERAKRTLSSSTQASLEIDSLFEGIDFYTSITRARFEELCSDLFRSTLEPVEKALRDAKLDKAQIHDLVLVGGSTRIPKVQKLLQDFFNGRDLNKSINPDEAVAYGAAVQAAILMGDKSENVQDLLLLDVAPLSLGLETAGGVMTALIKRNSTIPTKQTQIFTTYSDNQPGVLIQVYEGERAMTRDNNLLGRFELSGIPPAPRGVPQIEVTFDIDANGILNVTATDKSTGKANKITITNDKGRLSKEEIERMVQEAEKYKAEDEVQRERVSAKNALESYAFNMKSAVEDEGLKGKISEADKKKVLDKCQEVISWLDANTLAEKDEFEHKRKELEQVCNPIISRLYQGAGGPGAGGFGAQGPKGGSGSGPTIEEVD

SEQ ID NO: 71 - DNA, 2400 bp, Homo sapiens
aacggctagcctgaggagctgctgcgacagtccactacctttttcgagagtgactcccgttgtcccaaggcttcccagagcgaacctgtgcggctgcaggcaccggcgcgtcgagtttccggcgtccggaaggaccgagctcttctcgcggatccagtgttccgtttccagcccccaatctcagagcggagccgacagagagcagggaaccggcatggccaaagccgcggcgatcggcatcgacctgggcaccacctactcctgcgtgggggtgttccaacacggcaaggtggagatcatcgccaacgaccagggcaaccgcaccacccccagctacgtggccttcacggacaccgagcggctcatcggggatgcggccaagaaccaggtggcgctgaacccgcagaacaccgtgtttgacgcgaagcggctgattggccgcaagttcggcgacccggtggtgcagtcggacatgaagcactggcctttccaggtgatcaacgacggagacaagcccaaggtgcaggtgagctacaagggggagaccaaggcattctaccccgaggagatctcgtccatggtgctgaccaagatgaaggagatcgccgaggcgtacctgggctacccggtgaccaacgcggtgatcaccgtgccggcctacttcaacgactcgcagcgccaggccaccaaggatgcgggtgtgatcgcggggctcaacgtgctgcggatcatcaacgagcccacggccgccgccatcgcctacggcctggacagaacgggcaagggggagcgcaacgtgctcatctttgacctgggcgggggcaccttcgacgtgtccatcctgacgatcgacgacggcatcttcgaggtgaaggccacggccggggacacccacctgggtggggaggactttgacaacaggctggtgaaccacttcgtggaggagttcaagagaaaacacaagaaggacatcagccagaacaagcgagccgtgaggcggctgcgcaccgcctgcgagagggccaagaggaccctgtcgtccagcacccaggccagcctggagatcgactccctgtttgagggcatcgacttctacacgtccatcaccagggcgaggttcgaggagctgtgctccgacctgttccgaagcaccctggagcccgtggagaaggctctgcgcgacgccaagctggacaaggcccagattcacgacctggtcctggtcgggggctccacccgcatccccaaggtgcagaagctgctgcaggacttcttcaacgggcgcgacctgaacaagagcatcaaccccgacgaggctgtggcctacggggcggcggtgcaggcggccatcctgatgggggacaagtccgagaacgtgcaggacctgctgctgctggacgtggctcccctgtcgctggggctggagacggccggaggcgtgatgactgccctgatcaagcgcaactccaccatccccaccaagcagacgcagatcttcaccacctactccgacaaccaacccggggtgctgatccaggtgtacgagggcgagagggccatgacgaaagacaacaatctgttggggcgcttcgagctgagcggcatccctccggcccccaggggcgtgccccagatcgaggtgaccttcgacatcgatgccaacggcatcctgaacgtcacggccacggacaagagcaccggcaaggccaacaagatcaccatcaccaacgacaagggccgcctgagcaaggaggagatcgagcgcatggtgcaggaggcggagaagtacaaagcggaggacgaggtgcagcgcgagagggtgtcagccaagaacgccctggagtcctacgccttcaacatgaagagcgccgtggaggatgaggggctcaagggcaagatcagcgaggcggacaagaagaaggtgctggacaagtgtcaagaggtcatctcgtggctggacgccaacaccttggccgagaaggacgagtttgagcacaagaggaaggagctggagcaggtgtgtaaccccatcatcagcggactgtaccagggtgccggtggtcccgggcctgggggcttcggggctcagggtcccaagggagggtctgggtcaggccccaccattgaggaggtagattaggggcctttccaagattgctgtttttgttttggagcttcaagactttgcatttcctagtatttctgtttgtcagttctcaatttcctgtgtttgcaatgttgaaattttttggtgaagtactgaacttgctttttttccggtttctacatgcagagatgaatttatactgccatcttacgactatttcttctttttaatacacttaactcaggccattttttaagttggttacttcaaagtaaataaactttaaaattcaa

SEQ ID NO: 72 - protein, 412 aa, Homo sapiens
MTDRQTDTAPSPSYHLLPGRRRTVDAAASRGQGPEPAPGGGVEGVGARGVALKLFVQLLGCSRFGGAVVRAGEAEPSGAARSASSGREEPQPEEGEEEEEKEEERGPQWRLGARKPGSWTGEAAVCADSAPAARAPQALARASGRGGRVARRGAEESGPPHSPSRRGSASRAGPGRASETMNFLLSWVHWSLALLLYLHHAKWSQAAPMAEGGGQNHHEVVKFMDVYQRSYCHPIETLVDIFQEYPDEIEYIFKPSCVPLMRCGGCCNDEGLECVPTEESNITMQIMRIKPHQGQHIGEMSFLQHNKCECRPKKDRARQEKKSVRGKGKGQKRKRKKSRYKSWSVYVGARCCLMPWSLPGPHPCGPCSERRKHLFVQDPQTCKCSCKNTDSRCKARQLELNERTCRCDKPRR

SEQ ID NO: 73 - DNA, 1239 bp, Homo sapiens
ctgacggacagacagacagacaccgcccccagccccagctaccacctcctccccggccggcggcggacagtggacgcggcggcgagccgcgggcaggggccggagcccgcgcccggaggcggggtggagggggtcggggctcgcggcgtcgcactgaaacttttcgtccaacttctgggctgttctcgcttcggaggagccgtggtccgcgcgggggaagccgagccgagcggagccgcgagaagtgctagctcgggccgggaggagccgcagccggaggagggggaggaggaagaagagaaggaagaggagagggggccgcagtggcgactcggcgctcggaagccgggctcatggacgggtgaggcggcggtgtgcgcagacagtgctccagccgcgcgcgctccccaggccctggcccgggcctcgggccggggaggaagagtagctcgccgaggcgccgaggagagcgggccgccccacagcccgagccggagagggagcgcgagccgcgccggccccggtcgggcctccgaaaccatgaactttctgctgtcttgggtgcattggagccttgccttgctgctctacctccaccatgccaagtggtcccaggctgcacccatggcagaaggaggagggcagaatcatcacgaagtggtgaagttcatggatgtctatcagcgcagctactgccatccaatcgagaccctggtggacatcttccaggagtaccctgatgagatcgagtacatcttcaagccatcctgtgtgcccctgatgcgatgcgggggctgctgcaatgacgagggcctggagtgtgtgcccactgaggagtccaacatcaccatgcagattatgcggatcaaacctcaccaaggccagcacataggagagatgagcttcctacagcacaacaaatgtgaatgcagaccaaagaaagatagagcaagacaagaaaaaaaatcagttcgaggaaagggaaaggggcaaaaacgaaagcgcaagaaatcccggtataagtcctggagcgtgtacgttggtgcccgctgctgtctaatgccctggagcctccctggcccccatccctgtgggccttgctcagagcggagaaagcatttgtttgtacaagatccgcagacgtgtaaatgttcctgcaaaaacacagactcgcgttgcaaggcgaggcagcttgagttaaacgaacgtacttgcagatgtgacaagccgaggcggtga

SEQ ID NO: 74 - protein, 389 aa, Homo sapiens
MTDRQTDTAPSPSYHLLPGRRRTVDAAASRGQGPEPAPGGGVEGVGARGVALKLFVQLLGCSRFGGAVVRAGEAEPSGAARSASSGREEPQPEEGEEEEEKEEERGPQWRLGARKPGSWTGEAAVCADSAPAARAPQALARASGRGGRVARRGAEESGPPHSPSRRGSASRAGPGRASETMNFLLSWVHWSLALLLYLHHAKWSQAAPMAEGGGQNHHEVVKFMDVYQRSYCHPIETLVDIFQEYPDEIEYIFKPSCVPLMRCGGCCNDEGLECVPTEESNITMQIMRIKPHQGQHIGEMSFLQHNKCECRPKKDRARQEKKSVRGKGKGQKRKRKKSRPCGPCSERRKHLFVQDPQTCKCSCKNTDSRCKARQLELNERTCRCDKPRR

SEQ ID NO: 75 - DNA, 1170 bp, Homo sapiens
ctgacggacagacagacagacaccgcccccagccccagctaccacctcctccccggccggcggcggacagtggacgcggcggcgagccgcgggcaggggccggagcccgcgcccggaggcggggtggagggggtcggggctcgcggcgtcgcactgaaacttttcgtccaacttctgggctgttctcgcttcggaggagccgtggtccgcgcgggggaagccgagccgagcggagccgcgagaagtgctagctcgggccgggaggagccgcagccggaggagggggaggaggaagaagagaaggaagaggagagggggccgcagtggcgactcggcgctcggaagccgggctcatggacgggtgaggcggcggtgtgcgcagacagtgctccagccgcgcgcgctccccaggccctggcccgggcctcgggccggggaggaagagtagctcgccgaggcgccgaggagagcgggccgccccacagcccgagccggagagggagcgcgagccgcgccggccccggtcgggcctccgaaaccatgaactttctgctgtcttgggtgcattggagccttgccttgctgctctacctccaccatgccaagtggtcccaggctgcacccatggcagaaggaggagggcagaatcatcacgaagtggtgaagttcatggatgtctatcagcgcagctactgccatccaatcgagaccctggtggacatcttccaggagtaccctgatgagatcgagtacatcttcaagccatcctgtgtgcccctgatgcgatgcgggggctgctgcaatgacgagggcctggagtgtgtgcccactgaggagtccaacatcaccatgcagattatgcggatcaaacctcaccaaggccagcacataggagagatgagcttcctacagcacaacaaatgtgaatgcagaccaaagaaagatagagcaagacaagaaaaaaaatcagttcgaggaaagggaaaggggcaaaaacgaaagcgcaagaaatcccgtccctgtgggccttgctcagagcggagaaagcatttgtttgtacaagatccgcagacgtgtaaatgttcctgcaaaaacacagactcgcgttgcaaggcgaggcagcttgagttaaacgaacgtacttgcagatgtgacaagccgaggcggtga

SEQ ID NO: 76 - protein, 206 aa, Homo sapiens
APMAEGGGQNHHEVVKFMDVYQRSYCHPIETLVDIFQEYPDEIEYIFKPSCVPLMRCGGCCNDEGLECVPTEESNITMQIMRIKPHQGQHIGEMSFLQHNKCECRPKKDRARQEKKSVRGKGKGQKRKRKKSRYKSWSVYVGARCCLMPWSLPGPHPCGPCSERRKHLFVQDPQTCKCSCKNTDSRCKARQLELNERTCRCDKPRR

SEQ ID NO: 77 - protein, 186 aa, Homo sapiens
PVSQPDAPGHQRKVVSWIDVYTRATCQPREVVVPLTVELMGTVAKQLVPSCVTVQRCGGCCPDDGLECVPTGQHQVRMQILMIRYPSSQLGEMSLEEHSQCECRPKKKDSAVKPDRAATPHHRPQPRSVPGWDSAPGAPSPADITHPTPAPGPSAHAAPSTTSALTPGPAAAAADAAASSVAKGGA

SEQ ID NO: 78 - protein, 116 aa, Homo sapiens
AHYNTEILKSIDNEWRKTQCMPREVCIDVGKEFGVATNTFFKPPCVSVYRCGGCCNSEGLQCMNTSTSYLSKTLFEITVPLSQGPKPVTISFANHTSCRCMSKLDVYRQVHSIIRR

SEQ ID NO: 79 - protein, 117 aa, Homo sapiens
FAATFYDIETLKVIDEEWQRTQCSPRETCVEVASELGKSTNTFFKPPCVNVFRCGGCCNEESLICMNTSTSYISKQLFEISVPLTSVPELVPVKVANHTGCKCLPTAPRHPYSIIRR

SEQ ID NO: 80 - DNA, 23272 bp, Homo sapiens
cgcctgtaatcccagcactctgggaggcagaggtgggccgatcacttgaggtcaggagttcgagaccagcctgggcaacatggtgaaacaccatctctactaaaaacacaaaaattagccaggtgtggtggcaggcacctgcagtcccagctactccggaggctgaggcaggagaattgctcgaacctgggaggcaggggttgcagtgagccgacatggcgccactgcactccagtctgggcgacagagtgagaccctatctcaaaaaaaaaaaaaaaaaaaaaagacccaactcaagtatcatctccaggaagccttcccctactcccagcaattaaatgctcctcagagaattcccatttttggtttactctttggtttacctccagacaggaagcccccactgacactgttgtagtcccagggtgcaacacaaagcagagatcacaagctgagtttaataattgcttgtggaatacatgtcccaagccacctcctgcaggaagcccttccagatgcccattctagccagtctggctctttgcttccataccttcacaacacttgtgcctcccccagggcctctttctcatcttgctttctggggcagctgtgtgcacatttgtctgtgtgcagcaactctctaaggcagggatttttactcctatttttgatgaggggagctgtggctcagagaggttgaataacctaaggccacacagtgagtggcagagccaggaatgtgacttgggtccatttgaatccaaagtccctgtactttccactgccctacctagatgtccctgtacctcctataaaatcagcatggagcctggtgcctggtagtccctacaaatattcacaaattggagcttagctcagctctcaggcaaggcccaggtcaaaagggcagatacagctttgggaccttagttgccaccacatgccataccttcttcccagcagaaggactccctccaagacagggtaggggtggaggatgtgaacaggggcagaaatgggcatgttttggggtcagacttggaggaatagcagagattggagtgtcagaaggtgagcatgcctgggggtgttggggagatgcaattcatcagggacagcttagtgtcaggggattagactggggcccatgaaggagaggcagaggctgatgggcctaggggtggtgtgggtaggtgagcttccccagacagtgactctgccctgccctctctccagctaggtcctcttccccattccttccccctttcctgactggatcctcttgggagagttaccctccttggcttcctctgctccaatctttttatcagttggccatcattacttatcattacctcaagtcaaacctccagatccacatggggctaggacattggcactggaccaaagaggccctttcctttgctttctctttgtctttttaatgctttgttgcaaagacctaggcggggagagagagagagagagagagacagagattgacccacagtcagggtcagggaattgaggggaaccaacccaattctctctccttcaattcaccaggtttgtatcctgcccttcctgcagatcagtgtcctgctagtcacctgggggtcaggggatggagtgaaggacaagacctccttccattgcagtgaagccacttggagaaatgtgtggaaaacagcaagacccagtgactctctcctcaccttctttccaatctcaggagagattttgtcccttcatccaccggcttctagattaaccacccacacccacacaggcgagagtttccctgaatattggaggtgacaggacatcaggacaaagtacaactattgtgccttggcccaatcactactttctttgtctggggccgccgctggctcctggctgcctttcgcacttttctccacccccacccctttctccccttccccctcacctggaacaccttccccttcctccttggctccttctgaactgccttcagagccacagactgtggggagtggccactgcgctcccaaggtgaggccctccaagcggggccgagtttgcccctcaactgggagccagcatgacctctgtgtgggctgctctctgcttcactgccccttcccccaatctgctaggtgaccctgggcccctttgtgccctctctgggccttcggaggattctttggggagacagtctgctctgacgccccttcccctgcagcaagcagcctggggagggaggtgaggataagtgaagtcaagttgttcagggggctaagcccatggaagggaagatgccacagagatacatgtggtcttgtgattgttgttttgtgctttttccccttttttgaaagctcaggtgactaggtgacttgagcttttaatttggtgacaatgtgggcactggctgagtccttaagagtacattgttgtaaatgccggtgacaacacactggggcatgggatccagagttaacccctccaggtcacagccaggttatatctccacaatgaaggggggaggtgggccatactttctcgccctaatgaaggtagctcaaaaacccctaggccaggttgtaatcctagccttatataaaaggaattctgtgccctcactcccctggatccctgggcaaagccccagagggaaacacaaacaggttgttgtaacacaccttgctgggtaccaccatggaggacagttggcttatgggggtggggggtgcctggggccacggagtgactggtgatggctatccctccttggaacccctccagcctcctcttagcttcagatttgtttatttgttttttactaagacctgctctttcaggtctgttggctcttttaggggctgaagaaggccgagttgagaagggatgcaagggagggggccagaatgagcccttagggctcagagcctccatcctgccccaagatgtctacagcttgtgctcctggggtgctagaggcgcacaaggaggaaagttagtggcttcccttccatatcccgttcatcagcctagagcatggagcccaggtgaggaggcctgcctgggagggggccctgagccaggaaataaacatttactaactgtacaaagaccttgtccctgctgctggggagcctgccaagtggtggagacaggactagtgcacgaatgatggaaagggagggttggggtgggtgggagccagcccttttcctcataagggccttaggacaccataccgatggaactgggggtactggggaggtaacctagcacctccaccaaaccacagcaacatgtgctgaggatggggctgactaggtaagctccctggagcgttttggttaaattgagggaaattgctgcattcccattctcagtccatgcctccacagaggctatgccagctgtaggccagaccctggcaagatctgggtggataatcagactgactggtcccactcttcccacaggcctcagagccccaactttgttccctggggcagcctggaaatagccaggtcagaaaccagctaggaatttttccaagctgcttcctatatgcaagaatgggatggggcctttgggagcacttagggaagatgtggagagttggaggaaaagggggcttggaggtaagggaggggactgggggaaggataggggagaagctgtgagcctggagaagtagccaagggatcctgagggaatgggggagctgagacgaaacccccatttctattcagaagatgagctatgagtctgggcttgggctgatagaagccttggcccctggcctggtgggagctctgggcagctggcctacagacgttccttagtgctggcgggtaggtttgaatcatcacgcaggccctggcctccacccgcccccaccagccccctggcctcagttccctggcaacatctggggttgggggggcagcaggaacaagggcctctgtctgcccagctgcctccccctttgggttttgccagactccacagtgcatacgtgggctccaacaggtcctcttccctcccagtcactgactaaccccggaaccacacagcttcccgttctcagctccacaaacttggtgccaaattcttctcccctgggaagcatccctggacacttcccaaaggaccccagtcactccagcctgttggctgccgctcactttgatgtctgcaggccagatgagggctccagatggcacattgtcagagggacacactgtggcccctgtgcccagccctgggctctctgtacatgaagcaactccagtcccaaatatgtagctgtttgggaggtcagaaatagggggtccaggagcaaactccccccaccccctttccaaagcccattccctctttagccagagccggggtgtgcagacggcagtcactagggggcgctcggccaccacagggaagctgggtgaatggagcgagcagcgtcttcgagagtgaggacgtgtgtgtctgtgtgggtgagtgagtgtgtgcgtgtggggttgagggcgttggagcggggagaaggccaggggtcactccaggattccaatagatctgtgtgtccctctccccacccgtccctgtccggctctccgccttcccctgcccccttcaatattcctagcaaagagggaacggctctcaggccctgtccgcacgtaacctcactttcctgctccctcctcgccaatgccccgcgggcgcgtgtctctggacagagtttccgggggcggatgggtaattttcaggctgtgaaccttggtgggggtcgagcttccccttcattgcggcgggctgcgggccaggcttcactgagcgtccgcagagcccgggcccgagccgcgtgtggaagggctgaggctcgcctgtccccgccccccggggcgggccgggggcggggtcccggcggggcggagccatgcgccccccccttttttttttaaaagtcggctggtagcggggaggatcgcggaggcttggggcagccgggtagctcggaggtcgtggcgctgggggctagcaccagcgctctgtcgggaggcgcagcggttaggtggaccggtcagcggactcaccggccagggcgctcggtgctggaatttgatattcattgatccgggttttatccctcttcttttttcttaaacatttttttttaaaactgtattgtttctcgttttaatttatttttgcttgccattccccacttgaatcgggccgacggcttggggagattgctctacttccccaaatcactgtggattttggaaaccagcagaaagaggaaagaggtagcaagagctccagagagaagtcgaggaagagagagacggggtcagagagagcgcgcgggcgtgcgagcagcgaaagcgacaggggcaaagtgagtgacctgcttttgggggtgaccgccggagcgcggcgtgagccctcccccttgggatcccgcagctgaccagtcgcgctgacggacagacagacagacaccgcccccagccccagctaccacctcctccccggccggcggcggacagtggacgcggcggcgagccgcgggcaggggccggagcccgcgcccggaggcggggtggagggggtcggggctcgcggcgtcgcactgaaacttttcgtccaacttctgggctgttctcgcttcggaggagccgtggtccgcgcgggggaagccgagccgagcggagccgcgagaagtgctagctcgggccgggaggagccgcagccggaggagggggaggaggaagaagagaaggaagaggagagggggccgcagtggcgactcggcgctcggaagccgggctcatggacgggtgaggcggcggtgtgcgcagacagtgctccagccgcgcgcgctccccaggccctggcccgggcctcgggccggggaggaagagtagctcgccgaggcgccgaggagagcgggccgccccacagcccgagccggagagggagcgcgagccgcgccggccccggtcgggcctccgaaaccatgaactttctgctgtcttgggtgcattggagccttgccttgctgctctacctccaccatgccaaggtaagcggtcgtgccctgctggcgccgcgggccgctgcgagcgcctctcccggctggggacgtgcgtgcgagcgcgcgcgtgggggctccgtgccccacgcgggtccatgggcaccaggcgtgcggcgtccccctctgtcgtcttaggtgcagggggagggggcgcgcgcgctaggtgggagggtacccggagagaggctcaccgcccacgcgggccctgcccacccaccggagtcaccgcacgtacgatctgggccgaccagccgagggcgggagccggaggaggaggccgagggggctgggcttgcgttgccgctgccggctgaagtttgctcccggccgctggtcccggacgaactggaagtctgagcagcgggggcgggagccagagaccagtgggcagggggtgctcggaccttggaccgcgggagggcagagagcgtggagggggcagggcgcaggagggagagggggcttgctgtcactgccactcggtctcttcagccctcgccgcgagtttgggaaaagttttggggtggattgctgcggggaccccccctccctgctgggccacctgcgccgcgccaaccccgcccgtccccgctcgcgtcccgctcggtgcccgccctcccccgcccggccgggtgcgcgcggcgcggagccgattacatcagcccgggcctggccggccgcgtgttcccggagcctcggctgcccgaatggggagcccagagtggcgagcggcacccctccccccgccagccctccgcgggaaggtgacctctcgaggtagccccagcccggggatccagagaaccatccctaccccttcctactgtctccagaccctacctctgcccagtgctaggaggaatttcctgacgccccttctcttcacccatttcctttttagcctggagagaagcccctgtcaccccgcttattttcatttctctctgcggagaagatccatctaacccctttctggccccagagtccagggaaaggatgatcactgtcagaagtcgtggcgcgggagcccactgggcgctttgtcacattccaccgaaagtcccgacttggtgacagtgtgcttcccttccctcgccaacagttccgagtgagctgtgctttagctctcgtgggggtgggtcaagggaggatttgaagagtcattgccccactttacccttttggagaaatggcttgaaatttgctgtgacacgggcagcatgggaatagtccttcctgaaccctggaaaggagctcctgccagccttgcacacactttgtcctggtgaaaggcagccctggagcaggtgtttttttggaactccaaacctgcccacccaacttgcttctgaaagggactctaaagggtccctttccgctcctctctgacgccttccctcagccagaattcccttggagaggaggcaagaggaaagccatggacaggggtcgctgctaacaccgcaagttcctcagaccctggcacaaaggccttggctacaggcctccaagtagggaggagggggaggagtggctgcctggccacagtgtgaccttcagaggcccccagagaaggacacctggcccctgcctgcctagaaccgcccctcctgtgctccctggccttggaaggggtatgaaatttccgtcccctttcctccttggggcccaggaggagtggagggtcccgggagaatattgtcagggggaaggcagggggtgtcatgggaatgggtgagggggctgaggtgcagaatccagggggtccctgcaggagccgcagtggtaagctgtccagctggaagcctggtaactgttgttttctcttgagaggggcttcctgtgaccttggctgtctctgggagcagggctggggtacctgagtggggtgcatttggggtgtgtgggaaggagagggaaagaaagatggacagtgggactctcccctagcagggtctggtgttccgtaggctagagtgcccctctgctctgcgagtgctgggcgggaggggagttggtgagagctggagacccccaggaagggctggcagaagcctttccttttgggtgctgtcaggtccgcatgtcttggcgtgttgaccttcacagcttctggcgaggggaggaatgatctgatgcgggtggggagggttagaggaggcctcaggcctaaggtggtgcagggggccccctaggggctgggcagtgccaaggcataaaagccttccctggtccctggtggcatttgaaggtgcccaggtgagaggggcttggcacctcctcaccctgggagggagaagaaaccagggaacaggtaggagtgggagacaggtgaggctttggaaatctattgaggctctggagagatttgtgtagagaggaaaatgtggttctcccccagggtctcctcctgggtttttaccctctaagcaacctgtgggcatgctgggttattcctaaggactagaagagcttggatgggggagggtggttggtgcccttcggtcctcggcacccccctccgtctccaacaccagctcaccctggtatttgtcatgtcagcaggagaaggtcaccatgttgtttttctcgcccctagtccttccttcctgccccagtccaaatttgtcctcctatttgaccttaatacttaccatggctttggaccagggaactagggggatagtgagagcagggagagggaagtgtggggaaggtacaggggacctcgacagtgaagcattctggggttttcctcctgcatttcgagctccccagcccccaacatctggttagtctttaacttcctcgggttcataaccatagcagtccaggagtggtgggcatattctgtgcccgtggggacccccggttgtgtcctgttcgactcagaagacttggagaagccagaggctgttggtgggagggaagtgaggagggaggaggggctgggtggctgggcctgtgcaccccagcccctgcccatgcccatgccttgctctctttctgtcctcagtggtcccaggctgcacccatggcagaaggaggagggcagaatcatcacgaaggtgagtccccctggctgttggatggggttccctgtcctctcaggggatgggtggatggcctaattcctttttcttcagaactgtggggaggaaggggaaggggcacaggaatataaggatcaagaaagaaagagctgggcaccacgaggttcaccctcagtttcgtgaggactctccgctgttcaggtctctgctagaagtaggacttgttgcctttttcttctgctctttccagtaaaattttatttggagaaggagtcgtgcgcacagagcaggaagacagtgttcagggatcctaggtgttgggggaagtgtcccttgtttcccctagctcccaggggagagtggacatttagtgtcatttcctatatagacatgtcccatttgtgggaactgtgacccttcctgtgtgagctggaggcacagagggctcagcctaatgggatctctcctcccttccctggtttgcattcctttgggggtggagaaaaccccatttgactatgttcgggtgctgtgaacttccctcccaggccagcagagggctggctgtagctcccaggcgccccgcccccctgcccaaccccgagtccgcctgccttttgttccgttgtggtttggatcctcccatttctctggggacaccctggctctccccaccactgactgtggcctgtgctctccacctctggggagggaaggccctggggtcttccttcccgcgagtttccctgacctaaatctggcgtggctgggtagtggccagcagtggtgatgcccagcctgttctgcctcctccttccccaccccaggagccctttccttggcctaggacctggcttctcagccactgaccggccccctgcttccagtgcgccacttaccccttccagcttcccagtggtctctggtctgggagaggcaggacaaaggtctttgtttgctggagaaaaggttgtctgcgataaataaggaaaaccacgaaagcctggttgttggagtgtacgtgtgtgctcccccaggcagtggaggccagccctccttggaggggcggctgcctgatgaaggatgcgggtgaggttccccgcctccacctcccatgggacttggggattcattccaaggggaagctttttgggggaattcctaccccaggtctttttaccctcagttaccaaccccttgcccaggccagaccttcctgctatcccctcctgggccacaagcctggccctcctctgtcccaattgtgatgaaggggcagttcaaaacttcttgattagtcatcttctcccctatcgacttggctttaaaaaatgaccttttcagacttctagtctcgttcactctttttgatgatgctttgccgtaacccttcgtgggtagagaaggattctgtgcccattggtggtctggataaaagaaatagagacctcacaggaagcagtggactggcctgtttccccactgttctttctgttttcacacctgtggccttctccccaccttcttcccaatcaacctattgtgtacatagcccccctcattgtcctttattcttctggaaagcagaccttggagggaggagtgagggggaggctcagctgtggtctctggggggtgggggttgggagctggggtggaagtccacgaagcatacacttaagatgctttggtgaagttctaaacttcatattacccaggctgaaaaaagagcacttgttcctagggctggaaatggaagccaaaacaccacctttttcagcctgtttcagcatctttagagatcagcccaacccacttacacagttgagcagagttggaggcctagagaggggagggactggcccaaggtcataccaactcatggccagagcctgggcctcctcactggccaggtgttatttcttccctctgggtagggaacctatttcagggacaggattgctatgtggtagtggtggtggggtgcgataggcgtggcaggctgggccacaatttggagtagtcatgccagagtcctgcatttatttattctcaagggccccgcctctgtggcccagaattaccccttcatgctccagtgcaccccaggcttcgtggccagcctgggaaactgtctctaccctggtctcccttcagatcagcttctagaaatgtttcgtggctacagtggcagcactgttttttccatgatgcaagcagtttgccctcttgggcggggttatcagtggctggcagggctggcacagcgtgtccgcccactgccacctgtgggttccaggagggcccagcccctgtgctgatgcccaccaccttctcagctcatgtctggggaagaggactggcagggggaaaggtgcctcctcctgaaaggtgcctcctctgtttttgcctaatataggcttgggaacactttgatgtcagctaattctgactcctttacttactagctgtgcggccttggggcaacttacttagcctctttgagcctcctgttccccatctgtaaaatggaatctcaatagtgtctaatagtaccatgtggagaaacttgtgtgaaatgatagctgtggactactgtacacagtactcaggatgtagtaagtgctcaataaacagctgttggtatggttgacgttatggtagtggttgtggggaggacgtaggaaactggagactagcttggcaaagctggctcttcctccttttagggaaagcttagagcatccccatggggtatacccatactcagactgtcctctggcatcgaggttggcccaggattcagttcagctgtcacagtgaggtggcgggatcagatgtggcaggccatgtcccttggaacttgagtacatcgtgtgatctctggaatgaaaacaggccttcaccagtgttgatggtggaaagcttagggaagtgcttcaaacacagtaggagggacttacgttagattttggaaggacttgcctgattcggaagctccaaagagtggcattacagagctgggtggagagaggggctagccatcttttgtgtcgcccaccgggctcatgtgtcatcgcctctcatgcagtggtgaagttcatggatgtctatcagcgcagctactgccatccaatcgagaccctggtggacatcttccaggagtaccctgatgagatcgagtacatcttcaagccatcctgtgtgcccctgatgcgatgcgggggctgctgcaatgacgagggcctggagtgtgtgcccactgaggagtccaacatcaccatgcaggtgggcatctttgggaagtggggcaagggggggatagggaggggggtaacactttgggaacaggtggtcccaggtcgtttcctggctagatttgccttgtctggctcctgcccctgagttgcacaggggaggtatggtggggtcttgccttctgtggagaagatgcttcattcccagcccaggttcccagcaagccccaaccatctccttctccctgatggttgcccatgggctcaggaggggacagatggatgcctgtgtcaggagcccctctctccctctcttggagagagtcctgagtgcccccccttcttgggggctttgtttgggaagctggatgagcctggtccatggagagtttaaaaagtcttttggtgttacctggtaatggggcacatctcagcccagatagggtgggagggagctgtgaaacacagggagggggttgctttcgggtatctactaggagtcagggtgaagcctagagaggatgaaagaaggggaggggatggggagtggtaagaacctaggatttgaattcccagcctggccaacccttgcagccatgtcttggcctcaagtggaacaagggctccttgaggccagcagggttgggggagttggggtgggcctgagcctctttcctgctagagctcttggtcctccctgcctccaccacccatccctgctctgcagaacccctgggtgctgagtggcaggagccccagggttgtcccatctgggtatggctggctgggtcactaacctctgtgatctgcttccttcctttccagattatgcggatcaaacctcaccaaggccagcacataggagagatgagcttcctacagcacaacaaatgtgaatgcaggtgaggatgtagtcacggattcattatcagcaagtggctgcagggtgcctgatctgtgccagggttaagcatgctgtactttttggcccccgtccagcttcccgctatgtgacctttggcattttacttcaatgtgcctcagtttctacatctgtaaaatgggcacaatagtagtatacttcatagcattgttataatgattaaacaagttatatatgaaaagattaaaacagtgttgctccataataaatgctgtttttactgtgattattattgttgttatccctatcattatcatcaccatcttaacccttccctgttttgctcttttctctctccctacccattgcagaccaaagaaagatagagcaagacaagaaaagtaagtggccctgactttagcacttctccctctccatggccggttgtcttggtttggggctcttggctacctctgttgggggctcccatagcctccctgggtcagggacttggtcttgtgggggacttgtggtggcagcaacaatgggatggagccaactccaggatgatggctctagggctagtgagaaaacatagccaggagcctggcacttcctttggaagggacaatgccttctgggtctccagatcattcctgaccaggacttgctgtttcggtgtgtcagggggcactgtggacactggctcactggcttgctctaggacacccacagtggggagagggagtgggtggcagagaggccagcttttgtgtgtcagaggaaatggcctcttttggtggctgctgtgacggtgcagttggatgcgaggccggctggagggtggtttctcagtgcatgccctcctgtaggcggcaggcggcagacacacagccctcttggccagggagaaaaagttgaatgttggtcattttcagaggcttgtgagtgctccgtgttaaggggcaggtaggatggggtgggggacaaggtctggcggcagtaacccttcaagacagggtgggcggctggcatcagcaagagcttgcagggaaagagagactgagagagagcacctgtgccctgccctttcccccacaccatcttgtctgcctccagtgctgtgcggacattgaagcccccaccaggcctcaaccccttgcctcttccctcagctcccagcttccagagcgaggggatgcggaaaccttccttccaccctttggtgctttctcctaagggggacagacttgccctctctggtcccttctccccctcctttcttccctgtgacagacatcctgaggtgtgttctcttgggcttggcaggcatggagagctctggttctcttgaaggggacaggctacagcctgccccccttcctgtttccccaaatgactgctctgccatggggagagtagggggctcgcctgggctcggaagagtgtctggtgagatggtgtagcaggctttgacaggctggggagagaactccctgccaagtaccgcccaagcctctcctccccagacctccttaactcccaccccatcctgctgcctgcccagggctccaggacacccagccctgcctcccagtccaggtcgtgctgagcaggctggtgttgctcttggttccgtgccagctcccaaggtagccgcttcccccacaccgggattcccagaggttctgtcgcagttgcaaatgaaggcacaaggcctgatacacagccctccctcccactcctgctccccatccaggcaggtctctgaccttctccccaaagtctggcctaccttttatcacccccggaccttcagggtcagacttggacagggctgctgggcaaagagccttccctcaggctttgccccctgccggggactgggagccactgtgagtgtggagacctttgggtcctgtgccctccacccagtctcggcttcccaccaaagccttgtcaggggctgggtttgccatcccatggtgggcagcgtgaggagaagaaagagccatcgagtgcttgctgcccagacacgcctgtgtgcgcccgcgcatgcctccccagagaccacctgcctcctgacacttcctccgggaagcggccctgtgtggctttgctttggtcgttcccccatccctgcccaccttaccacttcttttactccccccaccgcccccgctctctctctgtctctgtttttttattttccagaaaatcagttcgaggaaagggaaaggggcaaaaacgaaagcgcaagaaatcccggtataagtcctggagcgtgtacgttggtgcccgctgctgtctaatgccctggagcctccctggcccccagtacaacctccgcctgccattccctgtaaccctgcctccctcccctggtccttccctggctctcatcctcctggcccgtgtctctctctcactctctcactccactaattggcaccaacgggtagatttggtggtggcattgctggtccagggttggggtgaatgggggtgccgacttggcctggaggattaagggaggggaccctggcttggctgggcaccgattttctctcacccactgggcactggtggcgggcccatgttggcacaggtgcctgctcacccaactggtttccattgctctaggcttctgcactcgtctggaagctgagggtggtggggagggcagacatggcccaagaagggctgtgaatgactggaggcagcttgctgaatgactccttggctgaaggaggagcttgggtgggatcagacaccatgtggcggcctcccttcatctggtggaagtgccctggctcctcacggaggtggggcctctggaggggagccccctattccggcccaacccatggcacccacagaggcctccttgcagggcagcctcttcctctgggtcggaggctgtggtgggccctgccctgggccctctggccaccagcggcctggcctggggacaccgcctccgggcttagcctcccatcacaccctactttagcccaccttggtggaagggcctggacatgagccttgcacggggagaaggtggcccctgattgccatccccagcaggtgaagagtcaaggcgtgctccgatgggggcaacagcagttgggtccctgtggcctgagactcacccttgtctcccagagacacagcattgccccttatggcagcctctccctgcactctctgcccgtctgtgcccgcctcttcctgcggcaggtgtcctagccagtgctgcctctttccgccgctctctctgtcttttgctgtagcgctcggatccttccagggcctgggggctgaccggctgggtgggggtgcagctgcggacatgttagggggtgttgcatggtgattttttttctctctctctgctgatgctctagcttagatgtctttccttttgcctttttgcagtccctgtgggccttgctcagagcggagaaagcatttgtttgtacaagatccgcagacgtgtaaatgttcctgcaaaaacacagactcgcgttgcaaggcgaggcagcttgagttaaacgaacgtacttgcaggttggttcccagagggcaagcaagtcagagaggggcatcacacagagatggggagagagagagagaaagagagtgagcgagcgagcgagcgggagagcgcctgagaggggccagctgcttgctcagtttctagctgcctgcctggtgactgctgccttctctgcttttaaggcccctgtggtgggctgcaggcactggtccagcctggcggggcctgttccgaggttgccctggttgcctgagtggtaggctggtgtggcttagtgtagtggtgtggacgcaagctgtgtgttgtgtcctgtggtccttctgctcatagtggctgttggtcctgatgttattactacctctggtagtaatgctgagaagctgaaagccgattccaggtgtggacaatgtcaacaaagcacagatgctctcgctggggccttgcctcggccctttgaagtctgcatggctgggcttctcactcactcagtgtttcttgctgggggaaggaattgagtctcccacttcagactgggcctccctgaggaaagggttgtgtctccccactcagactgaggttccctgagggtagggctgtgtctctcccctccgacctgggctccctgatagggctgtctccccgctcagactgaggctccctcaggccagggctatgtctccctcctcagactggggctctgagggcaaggggtctggctgttcgtttaggatggggcacttttgcctacacactgaaggagctgtagcatccaagaatactagatacctttaatcctccaccagtcatggtgacaaccccaagcagcccacacattttcaagtgcccccaggatgcgtggagggaggggtctgtgcccattctcctgacattagcctgtgagctccgtaagcccgggcctcgtttacgtacctttgtgagccccgggcatctgtacctctttcctttgcccatactggggaccaaggaagtgtcaagtgcatgagtgaatgtgtgactcagttcagagggtgaggtcaggagcacagggtcgggacaggtggctggcatcttttaatgccttagcttatgttctttataccaacttggcctgtgctcagagtgagggaggccctgggggtcagggtaagcgtcagtcagggaggcaagactttgtggggatttcctagacagggccaaggcacccccagctcaccccgaggctgtgttagggaagtccttggagtgtctcccctcccccagcaatgttcttgtggcttgtgtgtgctcaggggatgctgggaaccaggcctgggtagttggtgtggggtgctgtctgtcttggccctatgtgaaaccaagagggcgtatattagtgctggggtgggggctctgcctaacttcagggctggatgaggggagtctcagttccccaggggtccttgggaaagataagggacttgacattttagggtttttaggtgattattctgctgatgggggtttgtgtgaagtgacctgggagctaactgaagttactctaacctcccaatacctttacccaacccccaagctggctgtatctgggaatatcagtttccaaaattggaggcttaggactccgtttcggggctccccagaagggtagggcctgttctgcctccttctcacaatcacccaggggcaggggcatgctgagaaagttcttggaggccccctttgcttcagctggagtagtgaagccgccgaattgtctctccccatcctaagtgaagcagcatatttgaaaggaaagacaacctgttacctgggcctgcaacctccaggcagctcaagagagatgaggcctacagccacagtgggaggggacatggggaatggagatggtccctcaccttcctggggcctcctgctctacgctaccccctcgggagcctcctgtccccagggcaggcccttgccattgttggtcacccggccaagcctctctgcctcaggcgttctcccagaagatctgcccactctcttccccacaccagcccctagagactgaactgaaaaccctcctcagcagggagcctcttctgattaacttcatccagctctggtcacccatcagctcttaaaatgtcaagtggggactgttctttggtatccgttcatttgttgctttgtaaagtgttcccatgtccttgtcttgtctcaagtagattgcaagctcaggagggtagactgggagcccctgagtggagctgctgctcaggccggggctccctgagggcagggctggggctgttctcatactggggctttctgccccaggaccacaccttcctgtcctctctgctcttatggtgccggaggctgcagtgacccaggggcccccaggaatggggaggccgcctgcctcatcgccaggcctcctcacttggccctaaccccagcctttgttttccatttccctcagatgtgacaagccgaggcggtgagccgggcaggaggaaggagcctccctcagggtttcgggaaccagatctctcaccaggaaagactgatacagaacgatcgatacagaaaccacgctgccgccaccacaccatcaccatcgacagaacagtccttaatccagaaacctgaaatgaaggaagaggagactctgcgcagagcactttgggtccggagggcgagactccggcggaagcattcccgggcgggtgacccagcacggtccctcttggaattggattcgccattttatttttcttgctgctaaatcaccgagcccggaagattagagagttttatttctgggattcctgtagacacacccacccacatacatacatttatatatatatatattatatatatataaaaataaatatctctattttatatatataaaatatatatattctttttttaaattaacagtgctaatgttattggtgtcttcactggatgtatttgactgctgtggacttgagttgggaggggaatgttcccactcagatcctgacagggaagaggaggagatgagagactctggcatgatcttttttttgtcccacttggtggggccagggtcctctcccctgcccaggaatgtgcaaggccagggcatgggggcaaatatgacccagttttgggaacaccgacaaacccagccctggcgctgagcctctctaccccaggtcagacggacagaaagacagatcacaggtacagggatgaggacaccggctctgaccaggagtttggggagcttcaggacattgctgtgctttggggattccctccacatgctgcacgcgcatctcgcccccaggggcactgcctggaagattcaggagcctgggcggccttcgcttactctcacctgcttctgagttgcccaggagaccactggcagatgtcccggcgaagagaagagacacattgttggaagaagcagcccatgacagctccccttcctgggactcgccctcatcctcttcctgctccccttcctggggtgcagcctaaaaggacctatgtcctcacaccattgaaaccactagttctgtccccccaggagacctggttgtgtgtgtgtgagtggttgaccttcctccatcccctggtccttcccttcccttcccgaggcacagagagacagggcaggatccacgtgcccattgtggaggcagagaaaagagaaagtgttttatatacggtacttatttaatatccctttttaattagaaattaaaacagttaatttaattaaagagtagggttttttttcagtattcttggttaatatttaatttcaactatttatgagatgtatcttttgctctctcttgctctcttatttgtaccggtttttgtatataaaattcatgtttccaatctctctctccctgatcggtgacagtcactagcttatcttgaacagatatttaattttgctaacactcagctctgccctccccgatcccctggctccccagcacacattcctttgaaataaggtttcaatatacatctacatactatatatatatttggcaacttgtatttgtgtgtatatatatatatatatgtttatgtatatatgtgattctgataaaatagacattgctattctgttttttatatgtaaaaacaaaacaagaaaaaatagagaattctacatactaaatctctctccttttttaattttaatatttgttatcatttatttattggtgctactgtttatccgtaataattgtggggaaaagatattaacatcacgtctttgtctctagtgcagtttttcgagatattccgtagtacatatttatttttaaacaacgacaaagaaatacagatatatcttaaaaaaaaaaaagcattttgtattaaagaatttaattctgatctcaaagctcctcttggtttctccttctccattgaatccttgctctagacttcctcccgccccctttccctcttcctctggggaacatggcatttgtcttgggtctgggaaaggtacgtctaatgtgtaggatatggggtgacccaccttgttgtgctgggggcaaagtccttccattttggctgagctggtcctgggggaacccatccatcctgtcttgatatagaaggtgggaagctctgggaatgggtggagggggagaaacagcttaggagccaagggcccttgcaattggtagtgctgccttcaggaattagatgatccaggcccctgtcccttagccagggaaagaactggccatgtctccaagcttgctgcccaggagacaggagagagctgtttttgtctgtgggggtcttgttggctgcaacaggctgggagtgggagggggatgctgctggagggctgtgactccagggtgtaacttaattttacatagttttacaccctggagttccttgagcctctggaagatggacccataggtttggtcaccactgatgggacactccctgccccagcttgccataagctcttctctcacgtcctgctcctgggtaaggtggcacctatccaggtctttgacactgaagggcagtgcttccaaattcacttcctctagcctctcatttattcttgcaaaccatagatatggcttgaataaatattgagccagtcattgtgctgctatgaataagacacaattccacccctcaaggatctggtgaggatgggtgggtggggagacccaaaactataaatccatgagcagaaaaatacataaaatgtgctgggggcatctgatctagcttgggagtgggagttgtattgggggtggtggctggggggtggtgtcttatgacattatctctaggctgccacttaaagtatggtttgaagacagggagaacggggcggcggagtgaaagggttgaggacatcccaggcagaagggatagtgtgagcaaggcatgaaggtggcacttgggcaggggcagggagtgggtgggcagggtggaggctggagacacgggcaagggttagctccaagggagcctgcagcaccatgccaagagcctagggcctgtcagggatgagcagcagccgaggggttttaaacactgagcggctcagtcagatagacttttccataggtgcctggcaacagtatgggaggcagagaggccggtagaggctgttgtggtcttccaggaggaattgtgctggtggtggggaagcacctttggtgactggcagtgccggccattgcaaggtctcagcctcaggcagcttttggtctagtaagtgctcctttcccaatcactgaccacgtgccgacccctacattggttaacactgaatctgcacagcagccctgggaggtaggtgcttttttttttttttttttttttttgagatggagtcttgctctgtcacccaggctggagtacaatggtgcgatctcgggtcactgcaacctccgcctcccaggttcaagggattctccctcctcagcctcccgagtagctgggattacaggcacgcaccatcatgcccgactaatttttgtgttttcgtagagacggggtttcaccatgttggccaggctggcctcaaacccttgacctcaggtgatctgcccgccttggcctcccaaagtgctggcattacagatgtgagccaccgcgcccggcaggtaggggcttttttcatcccatctggatttttgctggagcctttaaattggccgcctggcttctcctctggccttcctttagttgaatctcacacaactgccagagtgagcctgttaaaatgtgagttaagttttggcaccttttgactcaaaaccttccagagatagttttactcggagaaaaacccaaatggccttaaaaggcctgcaccatttgggctgcctccctgactactcaatgacttcgggc

SEQ ID NO: 81 - DNA, 4681 bp, Homo sapiens
gccgtccccgccgccgctgcccgccgccaccggccgcccgcccgcccggctcctccggccgcctccgctgcgctgcgctgcgctgcctgcacccagggctcgggagggggccgcggaggagtcgccccccgcgcccggcccccgcccgccgcgcccgggcccgcgccatggggctctggctgtcgccgccccccgcgccgccgggctagggcgatgcgggcgcccccggcgggcggccccggcgggcaccatgagccctctgctccgccgcctgctgctcgccgcactcctgcagctggcccccgcccaggtacgtgcggcccgacagcgcgcccgcccgcccgccgtgccctctctcaaggttggcggaagtgaggaggcgacccgcggcctcggccgaggggatctgcggggtccggccttggacgcgggcgtctcgggggcccggcgcgtgcatcccctgggaggtgcccctccccgctggcccgccagccccagtctggggccactcctccgccccaccccgtcccctgggcaccgccgggggcggggctccctcggtgcctgcaggacctgcttcggtgggcactgtgcgcgctcctgatctgcatgcagcccccaaacatgctcggctccgcggcctggagatttggcgcggccaccagagcacctgttgcgttttgggccagggcaggtcccgggtggccaggagaggacaggtaaagctagagcagtggccgcaggaacagagcaatctggaaagatgtcagagaggtggtgaagcctactgatgcaagggcaaagccccagggacggtgacagggccacaccctcctaaagtgtaccttgggtacaggtcttttctctcccacaggcccctgtctcccagcctgatgcccctggccaccagaggaaaggtaatacttacaaaaactcggcactagccagcactaagagggtttgtcatgggccctgattccaggtgtccatcatcttgtgtaactcccctagaagattcaaactattattctacccatttcacagaggaggaaattgaggcagtggggttactgggatctggataaacagggcaggggaagacaggttgtgagggcagagtggggagggctagtggagggtggctgtgacttggggactggggaggacagatgctgggagcagctgcaggaaaaccagtgaggacttaacccctaccggtctgctcccagtggtgtcatggatagatgtgtatactcgcgctacctgccagccccgggaggtggtggtgcccttgactgtggagctcatgggcaccgtggccaaacagctggtgcccagctgcgtgactgtgcagcgctgtggtggctgctgccctgacgatggcctggagtgtgtgcccactgggcagcaccaagtccggatgcaggtactgggcaggtggggcaacgggcaggggatgcaggtactgggcaggtggggcagcgggcagggtggatgctggctggctctggggctggggcagcctggagactgatgcacaggagacagggttggggggagggctggtggccagcctcccggctgttgggtgagcttttctcccttcagtcttagagcatcccctttctctctctccctcactgtcccccctgttcttctcctgagcacagatcctcatgatccggtacccgagcagtcagctgggggagatgtccctggaagaacacagccagtgtgaatgcaggtgccagccaggcccaacttctgagctcgcagaggccaggcttggggggtgctgggtatggtggtccacagaactggggaccaggttcctaagagtagaaccaaggggccgggcgtggtagctcacgcctgtaatcccagcactttgggaggccgaggcgggcggatcatgaggtcaggagatcgagaccatcctggctaacatggtaaaaacctgtctctactaaaaaaatacaaaaaattagccgggcgtggtggcgggcacctgtagtcccagctactccggaggctgaggcaggagaatggcatgaacctgggaggcgtagcttgcagtgagccaagatcgtgccactgcattccagcctgggcgacagagcaagactctgccacaaaaaaaaaaaaaaaaaaaaaaaaaaaagagtagagccaagggtaggccttggatctggggcaacaaagtaggatgcttgggccgggggtagtggctcacacctataatcccagcactttgggaggcccaggcaggcagatcacctgaggtaaggcgtttgagaccagcctggccaacatggtgaaaccccatctctactaaaaaaaaatacaaaaattagccgcgcatggtggcaggtgcctgtaatcccagctacttgggaggctgagacaagagaatagcttgaacctgggaggcggaggttgcagtgagccgagaccacgccactgcactccagcctgggcaagaagagggaaacacagtctcaaagagagagagagagagagagagagagagagagagagagtaggatgctgggatttcctgatcttcctcttgtttgtctgtgtctgtctatcttacttttcagacctaaaaaaaaggacagtgctgtgaagccagacaggtgagtcttttggactccagctgagtaggggtatggggagtacaagtgagtccagaagctgttgctcctctttctcctcccacccgtcccccactttcccttttcctctgctccccaagcctgtgttctctgccccgaccccagctctagggaagactcttccttcccaccccagacatgtcgcttctcctccctagggctgccactccccaccaccgtccccagccccgttctgttccgggctgggactctgcccccggagcaccctccccagctgacatcacccatcccactccagccccaggcccctctgcccacgctgcacccagcaccaccagcgccctgacccccggacctgccgctgccgctgccgacgccgcagcttcctccgttgccaagggcggggcttagagctcaacccagacacctgcaggtgaggcgtctgtggggtggtgtttgtttgggaaggcaccaaggccctgtcctggagcaggtccagggtgagcctgccagtaggaggagggccagggaaggggaaactgttgaatgtgttgaacaaatatttaccaaacagctgctggcacctggagctgtataagcaagtccaacattctaactcaggagtcagatacaggagggacaatgccagcagaggatgtcaagggctgtggtgaggggtacctggcctcgtctttcagaggtcagagatctcttggaggaggtgacatctgcccggagtagaaatgtaggacacagcttttccagcttgcagttcgggccttcccagaagcccctgtggtagacatctgcccttacctacgggcttcaagaggccaggggacatagtggaacccttgtccacccttacctgatgtgtttctcaccatccgtgtcccgcagtgaggccatggggtgaaatcatatgggcagggccagtgggggctcccgaggagtgtcaggaggggatgacctttgcaaaaggttcatccttcgccctgcagcctccagtgcccagggccgagtggtgtggcaggatgctcaggttgtgatcttagtgggcccgaggcacacatgagtccagggctggggctgcgctccagccagcatgaacagatcacttcctccctcctcaggtgccggaagctgcgaaggtgacacatggcttttcagactcagcagggtgacttgcctcagaggctatatcccagtgggggaacaaagaggagcctggtaaaaaacagccaagcccccaagacctcagcccaggcagaagctgctctaggacctgggcctctcagagggctcttctgccatcccttgtctccctgaggccatcatcaaacaggacagagttggaagaggagactgggaggcagcaagaggggtcacataccagctcaggggagaatggagtactgtctcagtttctaaccactctgtgcaagtaagcatcttacaactggctcttcctcccctcactaagaagacccaaacctctgcataatgggatttgggctttggtacaagaactgtgacccccaaccctgataaaagagatggaaggagctgtccctgcctgtgtcactgtttgtcactgtccaggctggctggtttgggcatgaatgtctgcatcactaaatccagagcttgtcttgctccctcattgtgcagatggaggaaatgaggactaaggccccacagcagatcccaggcagggccagaattatgtattcatcactttcaagttattgccacgcatgggagtcagggatagcccagtcaatacagactgcctgccctcctgctcttcaccagggttcttttctagaaggagacagccttctgtggccagagagcttggggtaggacccagatctactgagtgaccttgcttgtcactacccctgcctctctgagcagcagtttccacatgtgcacatagagggaacagaagattgctgtggttggcgtcctcgggccccagagaagtttgagactatctttacgtaatagaaaagaacacttgttcttcctgccaggca

SEQ ID NO: 82 - DNA, 109212 bp, Homo sapiens
acttcggggaaggggagggaggagggggacgagggctctggcgggtttggaggggctgaacatcgcggggtgttctggtgtcccccgccccgcctctccaaaaagctacaccgacgcggaccgcggcggcgtcctccctcgccctcgcttcacctcgcgggctccgaatgcggggagctcggatgtccggtttcctgtgaggcttttacctgacacccgccgcctttccccggcactggctgggagggcgccctgcaaagttgggaacgcggagccccggacccgctcccgccgcctccggctcgcccagggggggtcgccgggaggagcccgggggagagggaccaggaggggcccgcggcctcgcaggggcgcccgcgcccccacccctgcccccgccagcggaccggtcccccacccccggtccttccaccatgcacttgctgggcttcttctctgtggcgtgttctctgctcgccgctgcgctgctcccgggtcctcgcgaggcgcccgccgccgccgccgccttcgagtccggactcgacctctcggacgcggagcccgacgcgggcgaggccacggtaggtctgcgttagggtttgcggagaacccgagagtttgcgttagggtctgcggcggacccgagaacctgcgcgggggaaagtgtgtgtgctttaagcttgtgtacgtgggatccaaagttactgagctcagtgcacgctgctttggagaaaaatcttcttctttttaaatagaaagttgttactagagaggcaagcaagttacacgagtgaagggcccggagaggtgcccagtgagagatcccgaaatctatttcagactggtttcctctggggcaaccaaggggtcttgaaccctgcccagtcagcggggctctggagagtatgagttcattttggtcgggaaatgctcgtttctttccccagctgattcatgggactccaaacagattctgggacactggtgatcagtcaacccagccttactttcctggagtgttcatagtctgcagagcaccaggcgctgtgagcgactttagaaaaaaagtgtcagggactttagtaaccaggctccagagctttcagagttcacttgaagttggtcagacttgagatgtaacgggagattagagtcagttagatcacaatcaagcaatgcaaggcttgtttcaactttataagctcttcattcctaaaatctggtcatgagatactgcaaactaagtttttttttttcttgtttgggttttttgtttgttttgttttcttttaaataagaggtgtttaatcctttgcctgaaaatgttgccaaaatacttttgaggcatcctgattttgaaaaaggatttgtgtgtgttcctacttcttactggctcttccaaaagagtatatctttatctaaaaagttcatacctgccataaccatatagagtatgcttaagagagttcctaaagaagttatattcgacatttcagttcaaacacttgcagtaccccttgctggaactatactgcggtagtttatttcaactggtggcaagtggagaggtacctgtggtgtgttacagtcaactttaatttgactgttgattaacacatacacaatgtgtagaaaatagccttatattttgaaatattttatttatatttatattttgaaatacacttaaagattgagaagactaatttttggaaatcaaactacctttgcatttaaattttgggaaaacattaaaatgttggaatgtgtaataatttaatataggggttaaaggaatgcctcttgagtaaaaacaatatacatgaaatagaacagactgcattctgtgaatcacaaaaataattttcagtgcctatacttacattgccgtaactatagtgatgaaaatatctttctgttcttaaataccgcagaaatgtaataatcggctcaataacgcttctgataatttgagtccttgattttgcagtacctatttgctatttctgcaaagtcaaaactagtaaaagtatgatttagtaaggcaacatctctgtattggttacggtcacttactttggtttacagtaagaaaatgtgcagtagagagtaaaatgagaaacattccctgataagccaatagcctgtatgagagtcactcactgctgggtgagtctagaattaatgtaccttgagtgtgtgtgtgtgtgtgtttacgtgtgttatgtataggtatgggattggaggattaaaaaagttaacttatttttaactttcaaaagtgtcttcgttggtgatgtaaaatttgccattggtgatatggcaaattttaccattgctgtgaaaatcactatgcatttttgtttgcaaatgtcgcttttcatatttaaccatttttatattctgtatggtgaatatgggttagtattctgcatgtgatgtgggttcctttcctatgtgatgaaacatcatttcccatatgaaacatcatctctgagttccatagaccacaaagcagtatttcattgctccattaaagtgtcgttccccagtgggtgaatagagccttgacagggcatgtgtcattaatgcattcagtgaaactgctgtgtccttgctatgaaacatgtcacacaactgccaagaaactgatatgaagactctatgtctctccctagtggcctgtacaagcaccacatttagatttaagcactagagaagaactggggagaaatcaattgttaattttctataactacatgaaccccaagaaaatatttcagaaggtaaacagaagatgctaaatatctataatcccaatagatgcaatgttttcataactttcacctaggaacttttttaatatttaaaaaatcaaaaatagcacacaaactatgaaccaaggttagccatccagcccttcagcccacccgtaaagccatgcaaaagattgtaggtaaaaatcacaaatagaatgaagatctccttattcctcgacttatatttgcatttactggattcctatttctagttatttgtggttgcatgacttactgaaaagtcttaaaatgtttctctgaaggatgttaacacaaacaagacagtgtcaaaaaagtaaggcaggcaaaagtaaaattaactggacatgatgggaacaaaagagaatagcaagtctgaagctgttctatttacaatttttcttatagtatatgattatgtttgtcaacatctactcttataagagatttctgacattcctctgagtgatgctacttatatgaggttttagatatagaaagttcaattcatctttcattttgatttccactccattatagtcttctgaactatgaatatctgattgatagctatttattcacaagacagttatcaaaattgcttcatagaaagcagttaattactgatcttagtggcatatgtctaagacccgtagatctctaatcctgtccttttcagttgagttgagaaagacggagggtagtggatttagatttcattttggacttccagttctggttccggttcctcttgagaggaaggtcctggcctcctagttatctccatgtgtccaacccagaatgctgtttctcagctcttgctggggttttcaccaacagaggaactggcgtgagactaatgaaggtttcccgaatccctgggactgtgcttgcctgcttgcctttggcagtcctggggttgttattgagagtaggagtttataatcattatctgtgatgttcataacgtgtgttaagcacttcgcaaagagctttgcaagttagttttgtttttcactacacctccataatatggacattattttatttcattaaggatgatgaacccaagatctgaatgacttaaccaggaaaaagaatagatgtttttttcctttttttcttttaaaaaaagttttatggcatataccaacagtccccgacttagaatggttctatttaggacttttggactttacaatggtgcaaagtcgatagacattcagtagaaaccatacttcaaggtttgaattttgatcttttcctgggctaataatatgcagtaaaatactttctctggatgctggacaatggaagtgagctgtgaccagtcagccatgtgatcgtgagagtaaacaacaggtactctactgtatattaaatatattttcaactcaggaggaatttgtcaggatgtagccccatcgtaaatcgagaagcatgtatgttttagagaaatgtggtaatgggtttgggcctttgggcctgtgattcagactcctttcagcccctctgctggtctcctttggcacactatagcagcgtgcaggaaggcagagaaaagcactgcgtgtgactttgcagttaggggcaccttgttgcatttatttaggtcctaattccccacaacgggacaaacggaaataaacccagactttcttccaggctttaccacatggtgttcgtttgactaaagataaattataaatgacctaatccatggtaatattataagaacgactgcttaactggaggcttaacaagattttctgacaaacggtttttcaaagttgtgctcaagtaacttcagtgaaagattgtgattttacctctgccaaatgacctttcacaaataagtggatttggaaagaacaaatttaagttggcagaagcgttatacttcctctgacttctgagcatatattgtttcacctttcaccagttacattattccttgtagatgtgcattttataaatactatatgggtctaccttttgttacaaacacatatttgtatgtacagatttgtataaattgtggattaagttatcattgatttttctcattagaaaaaacagatatagcagagaactttaaacaaggagagatgctgatgagtttgagttatagtgtaattataaaatttactataaatattttaggtttgtgtaattgtttttctgaaacttactagtgtaaatttttggggtggcttctttcctcggttgattaattttttttttcagagtttatgtttaaccatgagaaagcagagactgtttttatttaatttgctttattgggcatccatcatggaattaatcaaattgtacattaaatgctttgtcagtggattagtactgtttccttatactgctcgcgccctagtggctttcaggtgttaggagttatccacgatagttttttttccaattttgaaatccaaaaactcattttctttttctttctttcctttttttttttttttttgagacagggtcatgctctattgcccaggctggagtgcagtggcatgatgttggctcactgcaacctctgcctcgtgggttcaagcgattctcgtgcctcagcctcccaagtagctggaattacaggcatgtgccactagagcaggctaatttttgtatttttcatagagagagggttttgtcttgtaggcgaagctggtttcaaactcctgacttcaggtgatccacttgatctcctaaagtgctgggattacaggcatgagccactgcgcccggccccaaaagctaattttcttaaattatttggtgctataatcctgatctgaactgacataaggctatttatagtcattattatctaatttaaatatttctaatcttcactgggaaaatagtaatgtatttatttacatgatgctgccatcagtcctgcttgtttttggggtgtgagtattaatatgtctatgcacttggtttccagaaaaattccaggttcagagactcttgcagtctccaggcattttggataagcagatggattgtagccctgttccacaggccttcctccattgctttattgccttggggctgcctggaagaggcagggaaaggtaatccaggaattcaagaaagaagccatgtggatgctcctaattcctttttacccattagtaccaggtttatttgctctttaatctacttcaactcatgttaatcagttcttactagtggcagcttcagttctaagcaggaaattacagttcagtgtgtgatgcaaaaaatgtagagtgagtgatcttgtctataacaagcttataatcattttggagaaaataaatttactcattaaaaatactacaagtgaattaaactataaatccagaccatgtaagtggttttgtaagagagtcttgtgagttaccaccagttgttggctagccttctgggagttgcatgggcaggcctgggaaaggtggaatgatatgagacccaatgttaaaaatgagtagatgctaattacagaaatgggggagagagggatgttttgaatattgaagaatgacagcaaagtacagaggaagtaaaggtcagggatatttggggaactagaagcaaaccctttggtgcaaaagtcaagagctttaagggaaactgaagggagcatggtgggaagtgtgaaaaccaaagagaaagtctgagtttgagttgaaagcagcaggagccaatgaagattctttagtggtatgctgaaagtgaggtttttaaggagcttaacctggcattgttgcacagaagtgtctaagaaagctgaccagaagcttctcagaagcttctcagaagccattttcaactgcagggtttcttaaagtgtctggcagtgactctgcctttctcattacagtggccacccatatatggtattcgaactcctctatatgctcctgattgctggcgatgatagtggtgattacttttgacttactgtaggcacccatcattgtgctatctggatacatttacaaaagtatagaaatagacatctctgccattatggtttgcattccaaacgaagcaagcagtgtaaacagtggtcatgcttagatacacatacacagaaccccccacacacatattcatgcatacaccgcttaatagttcttcagactgccaagtgtgacttacgtgttctttcttgcatggttaagaatttgtagacagttcattgaaatagaatatttagacaatcagaagtgtacaagattagaatctctatatttgcacacacatttatttgtaggtcagtgggcaattgaaaaaaaagagaaggagagaaccctaaagtgtcctggaaattcctgctttttaaaatctgctaaaaatgagaccagaaaggtgggagtggggatgtgaggaggtgggtaaactaccaaataaacaatataaatactttggctgttcttataaaaggtttttttaaatatggtggaataatttactcaaactcaagagatgccacctactagagaaaggacatactgaaagaggaaatattcaaatgcacaactttgtgtaaaaggtaatacttacaagtttaaaagactcacttctaaagaagtttggcttcaacctgtcctcatttggacaggtggaaagatgtatattttggggtagaccagaaagatgtggtttgacttctatagttgaaaggtttctatttagacatttattttgtaatttaatttacctaaaacttcatccctaaattaccattttctcttacttttatgcaatagtaaagtatgcagtcataagtgataaaggctgggatcaaagctagctattttgctaactgcagaacctatgcactctgtttacactgcctgtgatagcgcctggaagaactcactgccaatatttctgcttgtttcagtcacataactgttgcttgtgtcagtgacgtaacttgtttagagatgcagtgcagtggataagagcacagggtatggacatgcctttctgtattcatgtcctgaggatgcctcttagtacctgtgtgaccttggacaagttacttagtttctctctgcttctttgtagcacaatgagtagatgctaatttttaatttttaattttttctttttctttgtgtctgttttgtgtatttagttactttatctttttttttttttttttttttttgagacagactctggctctgtagcccaggctggatggaatgcagtggtgctatctcagctcactgcaagctccgcctcccaggttcacgccattctcctgcctcagcctcctgagtagctggaactacaggtgcccaccaccacacccagctaattttttttttatatttttttagtagagacggggtttgaccatgttagccagaatggtctcaatctcctgacctcgtgatctgcccgcctcggcctcccaaagtgctgggattacaggtgtgaaccaccacgcccagcctagttactttatccttttaaaagtcctcttccaaaatgtagaatataattaatgcctgcttaatcaggttgttttgaggataagaatgtgtatataggccaggtgtggtggctcacgtctgtaatcccagcactttgggagtctgagtcaggtagatcacttgaacccaggagtttgagaccagcctgagcaacatggggaaaaccctatctctacaaaaaatagaaaaattaactgggcatggtgacacgtgcctgtattcacagctactctggaggctgaggtgagaagatggcttgagcccaggaggcggaggttgcagtgagtgagctgagatcaccccactgcactccagcctgggcaacagagtgagactctgtttcaaaaaaaaaaaaaaaaaaacagcatgtgcatacatataaagcccttggaaccatgattggcatatagtaagctttctgtaaatttgtgttaaatagatagtcttcatgatcagaaaacaaacaaagaatatagcatgtaagtactatgtcctagacatatgacataactgtgattcttcagcaccttgcaactaatttattaaatttttaaaattataaattactgacaattttcccaatttctaaaatatagcaagaggatataatactgatgtttgattttgaaacaggtgaaggaaatgcagggtgtttaatcattcagtgtctggaggctacatactgtagttctgcctataatatgttcccacttcccctgggtgccggggtttgttcctctcctggagggcagcacaggtgtccatagaccacaccaaaccaaagaatctgggatgatgctgtctccttatgtgcttcattcatacttaggtcatttggctgtaaaggattttggtacacataagctttttataatgccatataatttaatatgaactcatcttgaatatattcagagcatatacattttcaagtttaaatgtttattaatgaaacatgctaatgttgctactttgatgtgtaaatatctcatctatattattgccacaaaaaataaatatgcattctaaatttacaatgaaatcatcacagaatacctaaaatatcaacaatttcactgaggaaaatataaagaaaacttaaggggagaatgctatatgccagagttaaacttgtgtgaatttgtttaggaaaatgtgattgcactgttcctaagggaccctcttccagaatggtaactagtacagcgtgtgctgtctgagatgtgcggacactgggacactgggatgaattatggagtagatactttccttctctgagagtaagctgatttgcttgagtactctagtttattccaaatagttgattttgtttggtggttctctttgtcaatttgccagtcagtgctgtgacttgcgtggttaccctgtgctgaagactacagtgctgggggcattggaggcccgtgagcagacaggaaaaagggaggaaaaatcagtggtggacacacttcccagctcttgaacagctgacagcatatttttttgattcagtaacatccagaaagtattcacttccctaggattccagtgcagatgttagttggagtattttagaacttttgaccagataccacatttttaaacagaattttttttctgactggaactggaacaaagcactaaacactaaatagaccctcaggtagtatgtaagtacattaaaaattagataatactatattattcattcacatctctatggagatactgtatcatctttttaaaagcaattttcgtattaatatttgtatttcagaattagaattgtatgtaagcatataataaaatgaagctttatagttcagtgctattatgttttcccaattatagaattcaaattaacattttaatgtgattttcttcatagtaatttttcattgtcacactaatttatttttctctcaacttttttttatttaaaaattttttttttttttaatttgagacaggcctcactctatttcccaggctgcagtgcagtggcatgaacgtggctcgttgcagcctccgcctcctgtactcaagtgatccacctacctcagcttcccaagtagctgggatcacaggcacgtgccaccccacccagctattttttaaaattttttgtagaaatgaggtctcactaagttgcccaggctgctctcaaactcctgggctcaagtgatctgccttggcctcccaaagtgctgggattacaggcatgagccgctgttccagcctaatttctttttctcttacaagtgctttgcttacatttttattgttagaaacaggattcaaataactgcttatttaatattctttttatgtagaagaaacagtcttgaacttgataatacttttggttccaacttgttaaaatattggaaaaggatgaaacatttgtgaaaataatcagaccttggcactgcggtagttgaggaagagtcatgcgtgtgagtgagtgccactctgagacaggcagcactttctcccttgtggtaattgaatagggtatgggaagccgactacttaatctgcttcaggcaagcagtgttcaaagtttaacgcccttttactgaaatgacaaacataatcaccttacctaaaaggatgtgtgggtaatgattttaccaaatagttcacttggtgaacaatagtgaaaacagttcaccttcccttgtctttgtttacaattaaatgagcccctccaggtccctccctgccccaagagtggatgaatttggcaaatcagactgaaatgttaaagaaaatggtcttgactactctgttttaactgaagtgaccacacagctgccatgaatcctgtgattgaattcctataacctgtaaaagggattgttatttccactcactccaaatttcttggaagtagctagttgatatcagataccagatgcgaggctattttaaatcactgtgatttaatttactataatatcattgcctacatggaatatttttaattctttctttttgtttgtgtctgttttgtgtatttagttactttatccttttaaaagtcctcttccaagtttatgttttgaaaaaagagaacacttactgagattcatgtttgcttacaggtcatgacatttatgacttccctaaaaaacaaactgatccctttgtctcagagccaaattttagttttaacataatagtgattcattgtttgttctctctgagtcctagatctctcttttaattttggtgtctgtccatgccaaattagaattttattaaggccaaaattattcatgagtcatgaccatcacacttaacaattgggtaatttgaagctgcttcagatacacattaaagcaaataatgatgtcataaattttaatgcaatattttttttcctttaatattggtagcagtgaagcctgctctgttagagaccaattctgttttactttagaaaaatgtacctttgtgctcatgtccatgagagcacagtgtagttattttattactataatatagcacacagtgacacataacttagtaaattaaagattgaaaatatttaaaattggtgattttttgtgccatgttgatttgacatttattcttctatctgtctaaaactaggagcagtgctagtgtgacagcctcaagtcatgttaacacgacacacgtagaagactgacgctcgggcttcctctagtgcaaaacacctgaaattcaaattttgcttttctgtgctattttcctaattaaatgtatccttgatgttgagtttaactttattacacccctgttaaatatctgcaatgtgttgggaaggaggaggacacatatgcctgatttaaatttaatataactgtatagatataatttcattttccattcaatcattgaaatgatataaattaatatatgtacagctaaaattaaatctgtgatgtcgagatgaactccatgctgtccttggtgcactgtgtattacacatgggtattaaatgcgtgcttagtgcttagtgaatgggttagaaggagttttttttttttttttttgagatggagtctcgctctgtcgcccaggctggagtgcagtggggtaatctcggctcactgcaacctccgcctcccgggttcaagcaattctccctgcttcagccttctgagtagctgggattacaggcacgcaccaccatgccaggctaatttttgtattatttagtagagactgggtttcaccctgttggccaggctggtcttgaacacctgacctcaggtgacctgcccgcctctgcctcccaaagtgttgggattacaggcgtgagccaccacacctggcctagaaaagagttttaatagatacccctgtaaaatgccaagcaatcagttgccattactaagaactgcaacaagttccagttaaagatgtacatgtttaagagctgtcgttctttaataaaatatgaccaagatgtcttaaacatgggctttaatacatgttactgtgggtttcactccaacttaatagcacacaaagttctgaagacacatgatttcactggtggtacattcgcacattgttttctgtccatgtttaagttcattcttgtccagaacagtttctggttttctaagcctaacgtattaacatttgagttaattaaatcgatagggagccttttatctttttttttttcctatctgggggctttgctttcgcactgacattagcagttcccttcctatgtgcaataggaaaatgtgcagtcattccaggagcatggtctcctcaggaggttaaaagtgattgtaacttagaggttaatgtttcactccagaggaaagtgtttcaccccacttgatgatgtgcccctgggtgctcacagaaagagtagtactcttttttaaaccaaaattttagacacgtgttatgcaaatcttctttataaattacacattcttttctttccttttattcttttactccagtatactattttgcaattaaaacattttaaacttcttccagaaaaaaacttcttccaataacttcttacttcaaactacttttactaatgacaaaataactatgtccatcacagtgaggaattattcattgtttataccaccttgtattacttatataaatatcatcctataaaaaatactatatattgggactagattttcttaaatttaaatttaaattcttttggaaaatcaggttctatcagctctgttgtcttttcatctctaattgtacatcttcccactattttgatttatacatgatgttattatattaggatagctttgattttaatgtaatattagctagttttatggcttgaaaaacttagtacatagactatattcataaatacagcactatacattctagcatatggcgtgtgcacttaatctgaagaattagacattttttcctgttctgtgatgattgattgattggtggtgggggcagaaggtggccagtctttggcaacatgtaaaattttgttaaaattttgtcaaactgatttattccattgctaaattttgaaatcagcatttttttagggggaatatctcgagtttatgaggacagaaagaaatattcttagaaaattgagaaggttttgtccctgtacatgcaaactagggggtgtttagatcagagcaaatgtcttgcagcaggggttgacgccgggccatgtttagtcatcaaagcatgacttctattctgggaatgtggtaattgagaggtaaatattatttacaatagcccttataaatctttagttgttcaacaaaataacttgccatcagagttagatgatttagctaaaattatttaattgggttattcctacttgatccaacatttgattataatatatgtagtagcgttaaataatttgggatttctggcctctggctggctgttgaagactttttgttggtggcggggggcatcctaaggaacaacttgccctctactagcattctttactagaaaaagctcctatttacttgttttttttttcctaaatatgtgttttatttccttttggcattgtctttcttgctcccaattataattgtgagcaaatagcaatcgaaattctgtgtaacttccagcacagtttagtcatcagagcttgccagcaagtatgtctattgtgaggaaactgcatttgccacagctagaccatcagcaagtgaagtcgtattgtcctctgttttgtagttgttttttcctatttatgctttactctgattcaagttcagcatctcagtgatcataattgtggggaaaaaaattcattttgaactataaacagaaaagataccaagttgttgtatttgaaagattattttagaatgtggttataccttcaagtaaaataagctgtaaaataagctgaagaaccatatatttaggcacattttgactataaaatagatcctctacatataacaagaatagctttttttttttttttttttttttttttttttgagacaaagtcttgctctgtcgcccaggctggagtgcagtggcacaatcttggctcactgcaagctccacctcctgggttcatgccattctcctgccccagcctcccgagtagcagggactacgggtgcccaccaccatgcccagctaagtttttgtatttttaatagagacagggtttcaatgttaaccaggatggtctcgatctcctgaccttgtgatccgcctgcctcggcctcccaaagtgctgggattacaggtgtgagccacggagcctggcctatatataacaagaattgcttttatatgtctatatgtcacttcataatatttgtttattatttagctagttattgcctataagccagtatttaggtattatataaaatctgaggaaaacagttctataagattcagtaaaattccaattctataagattccaagatgtaaagtgttttaggtatttaaaagttttatatagacaatagtgactcatttgttatggtatatgaatatagacaagaacttagactgaagcaaaaaataacaattagttacatagctatttcaaagcccatgcagtagttttttgtttgtttgtttgagacggagtctcgctgtctcggccaggctggagtgcagtggtgcgatctcggctcactgcaagctccgcctcctgggttcaagccattgtcctgcctcagcctcctgagtagctgggactacaggcgcccgccaccacgcccggctaattttttgtatttttttttagtagagatggggtttcaccatgttagccaggatggtctggatctcctgaccttgtgatccacccacctcggcctcccaaagtgctgggattacaggcgtgagctaccgcacccggccagtagtttttaatgttcagtgaagttaaaacatctcccgtccagttatgctgtgtaataaatattaaagcaggagatattagaacaatacaacacttactgtgctatttataatttaaaatattaaagataaataatggaataactataaatattgatactatgataaaacttttagcatgtctaagttgttcattttgatagatacaaaaaaccaaagccaagcaaaataaaacacacctaaaactttatgaatgttaacaattttctatttttgccataaatctttggccgttgcaccatattttattgaataaaggacagttgttaagctagggcttggtccactgtgtgtcagtatcaggatgtgatgattcttttctgacccatattcttctctctctttggctttggttctcttgtacgactcttctgtaggtggccttggccacacctgtgaaatatagggcacagttgtgctgcttctactcattgtgaacttgatcatatgttttgtattgtgcctctcttcattggctcctttttattttagtgtaattcaaagtgttaattggaggttttaaatgtagttttgaccaaattgtgtttgaggtcacatgtacccagtttaaaaaacgaagaaaaaaattcaactcacttcccagcgtcctttgcagctaatgttgccctcgaatagttcttgctcataagagaaaatctagcagggatttatgggaaaacttttgcttttttttgctaaggcactgcttttcttcttgttcccttatttccttccatggaaatcagaaaatgttttataattttaaaactttacctttgtttctcaaaataacactttcagacttatgtaaagcaagattttaataattaatatgttgcctcgattatggagtaactttccaaagttgtactatcatgatcttaatttattgacccttagggttaagataatttgtgtgtttataacctaacattctttgcttggctgatagattcctttaaaatgttatgtgtttatattttgtacatactttaagaagctttattcaattgccacatttcaaataaataaaggttcttttttttttggtaagcctatacctttgtttcttctagcttttaaaagtgttaatagcgtgggaatgacccttgaccatctctgattgtttgggaaatggtaactagaaagaactgagagaggacaaacttggatgagaagtctcagaactgatagtaaaaacaaatgcaaacaagaaaatatattacgtacttcattcagattaataagtaattaaacacttgaactattcaaaaatctagtttgagtctaggcttttgcaagcctgaatttgtcatcataatcatcaaaattagaaattacgaaagaatgttaatttaaatttaaaacagctggaaatacaatacatggcctataagcttatcttctcatctgtcaacaactgcttgcatatgtcacatgaactgttttaactgcaattacaaaagtcaatggaatgtttagaggtgattcaaaaaatgtgattggctgacatatagagttatcctaagaaacaggctgtccaacacaattttaaatatactcaagctcttttatactgattaagagtttcaagttaaggttttgggttaaaaaatcaacatcaaatgataaataagaaatataatcttgtttaaattatttattctaatagtttatttatgaacacaacatatttctctttcattactttttttttctcagttgtaaaattctagagctggagcccataggccaatccgtagtatatctgaaatgattaaaggttttatacttgacaagccctctgtctgcaggttacttgcttctacttggagcagtggatttatcatcctccactccagggtaaatatctaaaagtcacttctgccacgttatttcccatctggtagattgttataatacctgtgagtcagtattatctgcacagtgtatttcctctgctcaaggcactttgaccatatgaggtgttcacatctgatcaatcgggctgaagcttgccctagtctgaggctggaccaattgatctctaacgatattcttacctgacaatctagaggatacaaatcaagatgtttcaagtgcagaaagcaacagtaaagcataagttctttttttttttttgcattctttttttttttattattatactttaagttttagggtacatgtgcacaatgtgcaggttagttacatatgtatacaagtgccatgctggtgcgctgcacccactaacaagcatatgttctaatgtgtaatatatcttcaagacagtctggaccatgaagtgtatttttacttattgagtgtatatgggaggatcattttataggattggttatatttttccatttcttgattctttgatacttaaatttttggtttcatattctcctctttcacatgttgtccccattttacatatgcaaagatagttgtttgccacaaaaataaacatttaacagactccaaacacatagactgtgtaattagcataacgaaataatagtggctgagtgacgagcagaagtgattcactcatttggctctgtggctttcaaagttattaatgatgttacatattcttctctattttatttaaaaactaacactcataaagttaattctcataatttttgctgggtttaataattcaaaatatgaatcaaaatttttatttattatgcagtttcattctattaaaattatctgctaaattaatattaagtagtcctatagcatatattatttaataattgcaagtagtgacatatcataaataaactgtataatatgtattattgattctgttatttttcctagcaatgcacagggaaccagtaaatttcacaagcagagaatactaacttgtcatttatttaatattctaaacaaatgaagccgcctctataagtgaattttctggacttctaaagatgagcattgttgagtttaataactcaaatttttattgtgttaagtaaagtatattaaatataacctcaccctaatgactcagctgtaattaaaaaagagttcacgaccagcctgggtaacacggtgagaccccatctctacaaaaataaaaaataaaaatgaaaattaaaaaaaattagccaggcatggtggcatatacccaagtactccgaaggccgagggtggaggatcgctcaaacctaggagtccaaggctgtagtgacctgtgatagtgccactgtactccagcctgggaaacagagcaagaccctgtctcttaaaaaacaacaacaaacctacacatgaaaattattgctgcttcccatcaattttcagtgctatctttatttaacctctctactatttgccttcactttttaaaattttgcttttattcttctttctttggtctccttctctaaaatttttcccctgcttctgtttttttgtatactaggaagacatttattatttttataggtatgatcaaattgtaaaataagtttatttcattctctggtgatttcactaactattttgagagtatcagttaaaatgggatttgtttgtgtgtaacaaaatctaactgtagtggctaaagcaaattggagtttatttttctctagtaactaaaaggccccagtgggcgtttaagggctggtaccacatggagcaacatcatatcatcaatgtccagactcctgtgcttttttcacttgatcatttttagagtttggccttctgtgcttcattcctcgtggtcacaacatggctgattgttgtgcagctttatgtctgatttcaaggaagaaagaatagtgagagaggaggttgttgccttaacacattcaaaccaaagcaaaagttttctctgaaatccccagtagatttgcccttacatcttctcaggtagaagtgcatttttgccattcctggctgtaagagaagccgataaagaaaatacatgcactttctaacaatattgaaattcttttcacaaagaaggaaaggagaatgaatgtactttgggtaggtatcgtggtctgttttatgttgctgtaaatcacaaactggatgatttataataaaaagaaattagttttcctcacaattctgaagactggaaagtccagggttgcagggctgtgtctggtgagggccttcttactgtgtcttctcatggtggaaggcatcacatcaggagagatttctccagagtgcaagaacaggtggaactttatataacaaactcattcctgtgataaggagcccactcccaagataataccattaatccattcaggtgggcagagcctcatgacctaatcaccttctgaaggtcccacctttcaatgcttttgcattggggattaaatttccaacacatgaagtttggggaacacattcacgctgtagcaggaggcaaccacatttgtgacattgcgtcattgtactttctagatttgttttctccaggttgtttgcaacgttgatgtactctttgtatacccacctgaaagattaatgttactgaagtattgtgtttaagaaagaaagatgaatgctaccatgtaagaccttttgactgtccaaaagattaaaattccagtttggagaggtagcacttacatgaaaaccttataaaacatgagaacttaaacttgctaatttcattgtgtcaaatcgcataacagagaaaggaaaaacttgaaggccactcctcttgaaaaagtatttgagtagtgtcgatttcagtgtaagaccaattaaataatgtcaaattaagtaaatataacattaaaatattttctttaacatattggtgttgatttcacttttactctgtaatttttgtgacattggaaacaggaaatattcaaattttgccttcttttggatcgtttcctctccgtttcttaatgtgtaaaccgtaatagggctttctgcagccaacgtgctcattcttttctttctgttaggctgtgccttttctgagaacagttggtactgatggagatttctgttctttttcttcacacaagtgtcatatgaaaattgggggatcagctattttcagatcacaggctcctctgataacagaataccataattccaactttcctgtgttgatttgtagatcccacactgtgtgatcatgacaaacatctaagcataagagggcgatgaatgattaaaatttattcactcttcccataaaacacctggtacagatgcagtgtgttgtcctcacagaggaaaaacagtggttcctccttccaagtggcgtgtccacagcactggtaccagataacaagaaccttagacttttcttgttgctgcagtgtgtctacctgtgcctctcttaagtgtcttacacgttactcacagagaaagaaatacaaaaatggaaaacataagctcacaaaaatgcatttagtgcatttatgatgttaatggaaaccttggatacagtcctctgttatttccttactactcttgatattttacaatattgctttattattcaaattcataatcatatatgtgttaaacaattttttttggtaagtagactgtgtatcaaacttaagagggatttgacatggaaagacatttaaaagatggcagaaaacagctattataagggcatttgaactttagatattttccgttggtcagtttccatagatcatcatctgattcactagggtttggccagtttatattatttaaattgtttcccctgcaactgtagtattttctttaatgttttgaattattcttaatgtgacttgaataagggtaattgtcacatatgctgatgttttcccattaggatgaaaatatttagaaaagctgtactagcaaaaaccaggttaacttgttttcaaagtagaatttaattattttatttcaagctttgattccttttttaaaaattaagtaaatgtccttgagagcaatacctttgtgtgtgtgtgtgtgtgtgtgtgtgtgtatcagttacttgcaccttcaattgaatgaaagacagtagtaggttgtattatggcagaggggtagaagaatggacattctcatgggtatctcaaaggtcaagtcagaattggattccctgtggatggaagagaggagtggagaaggtgcttctcatgtggaaaaacaagaaaagtctatgacaggcctcagtgtttgccagctgcagtggaattctcatagcttgtattgaactctgtgtcctaatcttctgaaaccacctcaagagagtatatattgctaaaataggagctcagctatttttcaggggcagtgatccagaggacactataacagaaatagataatttcaaagtcgaaaatatattagatactatttttattctctatctggaaagtctgtatagaggctttattctggtctgctttctcagataaatatcctattcaggtcactggaaataatatgtcaggttttaaaagagacttcatatgtagccaaataaacctgctaagcatatttagaaaatcatgctagtgactagtgtcttaaactgtttccacaaaaacaatgctgttaatagtaggatttacccttttgcattggaaatgagttgtcaaggttaaaaagatgagtagccagatattcttgctaaacatgttttgagaagaaatttaataatataaagtttttgttaaatgtggcctattaattttaaacaataatactgactgaagtcattaggtagctgtggaaagaagttagcctggtttttactaatgtagcttttctaaatattttctgcctaatgagaaaagagggataagatccaactacaattggaagcttaaatatttaatcaagtttgcagaactactattaagatcatatgtaactatcagatattttttaatctgaggacttctttctagtaaatagaaatttcttcccaagcattataggaatatgtcttattgacttatttttttggcatgggttactaggaaataatattttcagggagttcagggacccagatttgattcccagataattcagattaaccttctttaatcattctattttatgttattactggagagtacagggtaggttgaaacagcataaactgccaaatcagaactggatttgaatttagtgatgggcctcaggagctgtatgaccttaattctgtgagtcaggctttctgagtcaggctgtgaactgggcaaaatagtgtatacgttacaacattgtaacagagctcatttaaagcattgtctcatgttagctactgataaagcattagttcccactccagggcctgttagaattctaactccatccctgtgagtcatgttcatgctttcgtggttctcatttgaggttttgtgaccaaaggccccacagatggaataaaattaatctaaatagccatttattaatgtaatatctgctagctaattacatatttattaaatataaataacaaatagctccaagataccagtgacctccatgttgctaaagccaacagttattagaacttctctgttctgtgagcttttctgtgatggtcacaggtgagaccgcaagaggacacacaggagaggcacaatgaaacaaagtttattatactcataggtcttagacaggaggtcaccgcatgccacacagggtcacagggtgtcttagtttgttcagcctgctataacaaagtgtcttagactggataatttataaagaacagaaaattcattgttcatagttctggaggttgggaagtccaagatcaaggagccagcagattgggcatctgctgagggcccactcttcatagatggtgccttgttgcacgtccccctcacatggtgataggggtaaggaggaagcaggctctcccaagcctcttttataagggtaccaatttattcttgagggctccaccctcatgacctcatcatctcccaaaggtctggcctcttaataccaaaacgctggggttgatattttaacatgtgaattttggagggacattgacattacagaccacagcacggggggtggggggtggttctccatgtggcagaagacaggaaagaggagagagcttatgccacagcctttactggagtttcagggtaaaggcaaggcagagtagagtagggtaaacagtttagaactggctggtttgaatactttcagtaggctctaaggtataggattaatccctagttgcttgatacctgacagtgggaaattaaggcagaggaatattgtctcctggggtatatagccagataaaggaggtatggctctggattgggtaatttgcataccaaaggtgttctccctgctgaggtttttgctgtctgtaaggattggcagcccctggagggccatctctcccaagccataaacttttttttaagatgtcgaaatatcatagtactcagaaaaatttgaaatatatatatatatatatatatgtataaaacatcctcttacttggcagcatttacaatgtttgatcattatttttcagctttgtcttcaatgcactcattttacctcagtggtggttactccatcccattctccactgctggctactctccttgaacttttaatgtcgaagtgttcagggctcagcccactgtcctctattatttttcatttctattcactctcttagtgatttaacccagtcccatggttctagatatcttcatatctgtatctttagtccaaatctgtcttcttaactttaaaatataactagctgcctttgtcatttccactcagatggctaacagacacttcaaatttaaacattcccagttgaaatttttatctctccgtttctgatcaaatttgctctagctctacctatagccttccctaactcagtcagtggcaacaaattgctccgagttggtcaagtcaaaattcatggtatcatccttgacttctttctttcctaccctacattcagactcatcagggaatccaatcctcttggctgtgtcttcaaaaatataaccagagtctaaccacttgctacatctctgacctgagccaccatcgtcttccacttggatcagggcagcgttctgtttaccagtctcactggttcttatcttcacctccctagagtgtattctcaactgagcagaaagaagaatccttttaggatgtaagtcacattatattcctctcctgttatatgtaaggccctagaatagttccctacttcacaaaaagtaaaaaccaaaatctctatcaagtaatagtagtcattgccctggcagtgtttcaattaaaagagtttaacgactggttcattttatagaggtgtggacagtgtcaaggaaacagaaaagaacaaaagaacatgaagcatccaggtactatcaacagtgggaagtcctaactaccctagtcctgcaggggcaaggtgagcgaatagtgctatcagccctggaaattgctgggcactgtaggagaggggctgtcaatagaagctctaactgtagagtgcacacacttctctcactatggtgaggcaccataaatgtggtgaggcagagggagagtgaggagaatgaatatccaacctattttttcttcacatcccagccaaatacttggcattgttagtcttttttattttagctattgtggtggtgatgtaatagcatcccattgtggttttattttgccttttcatggaaactgatgaagttggacatcttttgacaagcttgttgcccatttggatatcctcttttataaaatgcctgtttaagtgttttgttcatttttctttttggttgtttttttttttttttttttttagatttctacaattcctttacatgatttggttgccaggctttttaaagctgtgtgtattgcagatatcttcttccatctcttactggtcttttttctttctttctttctttttttttactggccagatttctttaattttaatgtaaggtgattttttcttgtttttcctctatgattaatattttttatgtcttgtttaagaaacatttgtctatccaatgttatgaaaatagtcttgtagaagctttattgctttttcactttcagatttatatttacgatcaacctggaattgatatttgtgtagtggggagggtagaaatcaagactagttatttttaatttggataactaggtaacctagcatatttctctgctgctctgtagcattacccttgtaaataaatcatgtctctatacggtttctttctggactctgttttacgattgtatgctctctggcattagtatcacactgcctgaaattctgaagttccatagtatcttttcttttccttgtttttttttttttttttgagacagagtgtcattctgtcacacaggctgaagtgcaatagtgcaataatggctcaccacagccacaatctctcagggtccagcagtcctcccacctcagtctcctgagtacctgggactacaggtactcaccactacacttggctaatttttgtgttcttctgtagagataaggcttcactatgttgcccagactggccttgaactcctgggttcaattgatcctcctgcatcagcctctgaaagtgctgggattatagctgtgagccaccatgcacagcttcattgtaccttaatatttgacagaaatacctacagtttgttctttaatatcaccttgaatatagatattgagattccattgaatctaaaaattgatttggggaaaactgatatattagcaataatgggctttctattttggccttatagcatttatcctattatataatcatttttaagtttttctttttgtgtagagaccttgcatatcttccttttcggtacctaggtatgagacattttggaagctatggcaaaggatatttgtttttgcatttcattgtctttttttttctgtgtatagtattctaggttggcatttattttctatattctaaagatttttttccatattaccctctgttttttattacatccactatcaatcttattgttgcttctttgaacaagaaatgattttcactgttagcatttaaaattctgtctttggggccgggcacggtggctcactcctgtaatcccagcactttgggaggccaaggcagggggatcacgaggtcaggagattgagaccatcctggctaacacggtgaaaccccgtctctactaaaaatacaaaaattagccgggtgtggtggcgggcacctgtagtccagctactcgggaggctgaggcaggagaatggcgtgaacccaggaggcggaggttacagtgagccgagatcacgccactgcactccagcctgggcgacagagcgagactctgcctcaaaaaaaaaaaaaaaaaaaaaaattctgtctttggatttcagtagttctattatggtgtagtattttagatgtagctttctttgtgtttaatctgtttgatgatcatagcaatttttgaatctacagcttgatgctttttgttatcttggaaaatcctagaaaactacttctttaaatatgcctttttctttatagtctctatcctccagttaaatatatattaaacatttgcagtatctgctctatatctctatgtcacttttccaatcatctatgtctattatgcttttttttttctagttttctctggatgttttctactgatctgtcttccagttcactaatcctttctttagctctaatattattaattccatatattgagacctattttcagttattacattttacagttctcaaatttctgttttgtaaaataaattctattctttgctcaaattcttcatcttcctttctgttttctcaaacatactagttgtagtactttaacaatacctatttcttttttttgaggcagagtcttgctatgttgctgaaggtggtcttgaatttctgggctcaagagatcctcccagttcagcttcctgagtatacaatacctattttaatatcaagcacaactgaagtttcatttttattgtctattttttctatttttttgttagtcttatttgtggatatttttcttatttgctgaaaacttttgattgaatgtttgatgttttatttaaaaattataactgtctagactatgcagttttgcctttctagagaggattcagtgtatcctctggtaatcagccaaaaggcagacagatcactccagttccattagaatatgacatggctagaagcttttctgaagcctgtgtgtatcagtctggtatggcctacccactttccttgggagttgtctttcaggatacccattcagagcctatgaatttatgagattttttttctttggtgggttctgaacttcaatttttgtaacctctgcactatgagactgttgcatacattcttgtgcttttcagaagatatttgcttggcttctttgcttcttaccatggataatttgaaaacttagtgcctcaaaaggaaaaccttaagtatcagggaacctcatttctctcttgttttgtgtaccctctgtccgtgatcttagcccctcaaatctgactgcctttaaaggcccaaactttaatgttttgtctctccagctctgtgaaaatgctggcagtctcacttttgttaactctgttgttttctgcctggattttcagcctcttacctatccaaggactatcatattatattacccaagggaaaatgttgctctcataatgtctgctcacctctcttactttatgtttctgcccaggatcttggcaactgaaagcttggctgtctctatggttatatcttcaaataggtgtttgttgcttttcgtttcatctcatattttctagttgttctcagtgggaacattgttttgtcacaagctattccatcatggtcagaagtggaagttgctaagtcaactaccttgataattattgtgccgttagtatggcttagtgactaagggaacacatttttgtttggataggcctttggtttaaattcctcttactatgtttgagataccgttccattgaaaacttagttttatcacctgtaatcagaaaaaaaaagacctttttttagaggactcttaggaggattaattggaaaatattcacctaaagtactgattacaataaccatcacatagtaaatttagtaaatatgtctcaaatgatacagaaaccttatggaacctgtaaggttaaatcatgcatttctgaaagtagtaataatatttactttacttccagtgggttaatatgaaccaaattatttgaagatatttctattaaatattgattacgtgaaagaatataacatatacttaagatctataacaataaatgaatgccagtgtaccgctactcaagttaaaaataaaatactaccagtcccattgagttttatgtatatgtattccttataaatatttcattgagtttttgcttttgaaatttatgtaattggaatgatgttctatgcacctctttgcaacttgcattattataacttgctttatcttaatatcatctctgtgattcattcatgttaactatagttttttttcattttctcttattttcaatgtggtgagattatgttgtataatatctcccaaatatgcatttattattaatagaaatggcgtgctttttgatctttcacttttggtcctttttccttggaattgtatttgggaattagttgaagatgaatttctctagagcagctttttgtttgcttgtgctccgcacctgtggacactataaatagagaccactttcaaaggtatttttggcttaagtctgctcgaaccacacagatagtgttacttcagaccacaactaggatgagagctttctcctgattatatcccaaggaggagatttctttcttccttttacccagagcaaatgttgagacaggcaaatttccttgcagtctccttctgtagatcagagttatttttctagtttgcccttatattgagaggacactatagatttgttctagcttaacttagggaactactattagactctttaagagagctctgggctctgttgcctgttaaactgtcaagttcaaagcccaggttcaccagctggagcaactgttccagggtgaatatgacttagtgttgaatactctctgaattatttcactttatttttgcacccctaggaatactttaccttcttaatagatctttatatgcagacacacatatgtttaaacatatggaagtacatatgtgtgcatgtatgtagataaatagatagatgcactttttcagaaagagtcttctaccgaactgttagaaacagaaatgtcttaagtctgatttgtgctgctgtgacagaatacctaaaactgggtacatgatgaaaaatagaaatctagttttcacagttctagagattgaaacgttcaagatcaagttgctggcaggtcaggagcctggtgagggccccgtctctgcttctaaggtggcgctttgaaggctgcgtcctctggaggggaggaatgttgctcctcacatggcagacggacagaagagcaaagagatagaacccatgatacatgaaagcccttttgtaaaggcattaaacccaccaatctgggcaaaggcttcatgacctaatcacctcttaaaggccccacctccccccatattcttacattggcaattagaattcaacatgagttttggaggggacattcaaactataccaagaaataactgattcagtttttataagaaattttagaactgtccctaagacctggtgagtttcaggcctcatgttctgagcctacatctgacatcagctaccatagtatccgctgtgcaggcagagcctcttcagtcataggtatggggtgaaacagatttccacctcttccctgagcttcgctggcacagaataaatgcattctaaagaaaactgatacgtcagagacatctgagcttactcttaattgctttcttacctttctctgtcttgggccagattttcttccaggctgatggcttcttccaactctgaattctagcactctctgctgtttcattttgtattccatgccttcgtctcttctctgatcccttccatctgcctgaaagcacttcctttttattatttctgtgtcctataataataaagttaacaaaagtgttaagtatatgtttatttttccaaggttacataggcacatgtataatgtagggaaactggctgacaatcagagacagaagacacatacacgtgggcccacacacattcgttcactgttgtccttaatgcagtattcaacattacaaattactgtaatcttaataaaactgcgacattgttttccttgtttatttagggagcacctttaaaaatcatgtatttgctgatttattcattcactattgtccttaatgtagtattcaacattccaaattcctgtaatcttaataaaactgtgacatagtttccttgtttctttatttagggagcatctataaaactcattatttactcctcagaaaacttgcatgggcatatagttatgaaccagtttgaatattatgattttatattcacaatatttttatacttatgatcctaggctaaggatatttatattagaatgttcgctgaggacttaaataagttctcactgatacttacactgaatattatctcaatgtacttgagagaaaaggtattgcaagtaaaggtaaatatatgagtacatcaattgtataatttaattttctcacaattttaggacaattttgtataggatctataatcatatacttttttaaatattcacttgcttttattaaatcaatcacaagaaaatacagaacgttttccccttccacttctgaagtggaggaaatcacttcaaattcatgggatctttgaactttgcccattgggccagacttgcagtatcataaacttctttttcctacctatgtatgattttgccatgtgcgaaacaatcattgctagtaccacgagtgagtgatgataagcttagaatacatccagctaagatcagtgccatttgaagctccctcaatatcgcatttcttcggttctttaaaaaaaattcattgttttggagtcagcatattattaatgaatggagtatttgaggggaataaatatgactttggcaatatcacatgcatgggaaaaattggctagagaaagggctaagtctttcattctgtgttttagagaacagctttagctcgtatgaaaaaattctggcatagatatgtgagggggagtgttggataagaaaaggaaagagaaaaagcttgctgtggagtggaattctcatcacatttctttcttacctactactctggggaaacttcagttacagggctgataaatatttattaagaatatatagacagtataacctaaaaacattggaagatattttagcgaggcttgagtcagattaaatctaccaaccgctaaaagatggctttgcctagagaaattcttttttctttgggagcagctattagggaaaagcctattgcctaatatcttaattgaaacctatgcataaaattcaattaaaaatggcctatattttgaattgtttttcaagttacagaagaactttaagatctttgtaggtaatttctaaaaagcataaatatcttaaaatatatatctgtactatcaccattaaaacttaccattctttgctctatattttccaaagctatattcagagaaaataaaacctattatttcatagcctgctttaaaaatatctcttaaaatacgctatttttcatctcctgatctatccctcaagaatatgattttaaaactgcattacctcatttcgacttatttgttttatgtcctccttgttattaactatttttaattttttctgtgtaaaaacacttatttctttacatattttctctaaatttggaagctatgccttcgtcaatgataccatgttaacattttaaatttttaaaaatattttaatatattttattcaaacagtcccaataattaaatttatttcactggcaaatgcgatataaaccaattgctgcatctctcctctccaaaaagcatgtcttgttctagtgatgtatttggagatagaagacttaaattattttatttttttttactttttaaaaatgagaaatgaaaactcggctatatgcatggtgtacactgtgacgttttgattgaagtacattgtggaatgattaaatcaaactgattagcacattatcatctcacatacttatcattttttgtgatgagaatgtttgaaatctactctattattatttaccatagtcaccatgagtatattacatcttcagaaattatcccttctgtctaattgaaactgtaccctgtacacaacatctccccgttgaccaccccaccagtccccgagcccctggtatccaccattctactctctgcttctatcatttgatttttttaaatttctacatttaagcgtgatcatgcatatttgtctttttgtgcctggcttatattgctaagcataatgccctttagttttattcatctttttgcaaatggccggatttccttcttttttatggttgaacaaagtaccttttttccccccactgtcccaaatatatgggctcaacccccaaattggcaggtctaagaagtctttccaaagggtagtctattacatttaatttctaaacataagttgaagaaaagaaaatttatcctgacagttccaaagttcaataaaaagtatagtttttgagtttttacttcagtaaggtattattttagtttcttagcttttcagaaagtctcagtcttttcaatgggaaactctcttagggcatttaaaatataatttgctaacaatgaacttttagatgagtaatcgtggctgctatcactggccctggatggcagtgggatgagcttgcaatgccaaggatacagctgagcaaatgccactggaagctaaataacatgaaagaaaccagggttttgttgtttacaatggccatgtgatggtatgagtacaggaaagggctagaacctgggcatctgaggagaaaaagcattgacagcatggatgtaaatgacgactggtatttgaatgcaatgtggggccagaggtagacatcatggaaaagtatcagactttgcatacaggacacaaactaaagtaatcactagggttagaagaggagcccactttctggagataggttactcagagcaagaaatgcagcaagtcagaaagctgtcgatttgggaagctacttattaatgtaccttacatcctccctgacaacaatcgagattgataaccacatttaattcagttctagtcagtaagacggaggttttctagcaccagctgccaagattaaaaaatgtgcatgtcctagctctgggaagtgtctggtatgattgatgcttggtacttgttcatctaaatatgaatttactactgggaaagaaattaaacttctagatattcatttggtagatcggtgaggtgactgaagtgtggcaaacctcacaatgattatgaataaactttattaagaaaaactgaggcaattaacttatttgttcttcaaaactgaggaaatatttgtcctcacatatatgatagaatattgtttgctgctggtaaccaatctttgctttcttctactaacaacttgtttgtcaatatgtcttatttctcactctaataagactatgtctaaataacttctctcctaagggttaaaaatacaaagaattttcacacataaccaagtaataaagaatgtatattattgaatgaatgagtaatttacaaaagaaagtgttgagaagtagaatacataatttcagatttatgaaatatgaaatttcagattcaggatctgtccagtggagttgtgtttttacttttatggggattaagtcaaaggcagtatattaaatataatggaataatattcccccaaaacatggtaaatctatactttccctgaatataaattttcctttaggacaccaaatctttaattaggttaattataatttcaggtagattaaagaggactatttctctttaaacataaggataattatatgagaattaaatctgtgagaaagaattggaacctgaaaaagacaatggagaaaactagcagacggtatgttcaactagaagaaagagaatttaaaagttaaacccaaggtggtgaataatcacaaaaattgttaatgaagagcacttttttttttttgctgatgttctttaaagttttttagccctggtaatacatatttagaattattttagaatttgattatctatgactgtaccaatattattgtgttagcagtatgagtcttgctttctattattgaaatcgttgttaacagatcaaattacccattatagttttatgctctgtgcatacagtggcatgacttagattagaagaggtggataatgttgttctcatattgatattataagcttttatcacagatctagggacctttgtcttctaattcttgtgtgtttattattgcttattccattcaattggcatgtaattgaaatggaattgaagacaagtacacatgtgtgttcctttatggcccctaacattcactgtttagttatataggtctagattatgaatggtgcctagaaaaaaaagtatgaataaggaataattaataatgaatacttatttccatcacctgttaacatactctgtccatttattcctcattttaccgtctacatttaagttctcttttctagccaccaagcattattgtctagctaccatctactgagtgtttaatatatgtccagaattgagcagagtgctttgtatgtaattcatataaccaatctagcaaacatccttgatttttcattttacctagttgcctaaaccttccagcaatctattaggaagtcaaaaagcttctcttcctctgaaatatattccaaatccatccatttcacctgttattcttctaggctaagctgtcatcatcctttgctctggtgattgcaatagaacctaattgtcctatctttttcttgctttacacccttaaaatctaatctacttcttgaaatcagggtgtgtttcattgtaaatgagataatatcatttctacatcttaacctagcagtgacttctttccatcatatctggactaaaatccaaactctgtatggatgataagacctatcagaattggagtacgtttttttcatccccatcacatgccatgcccgttcttttcaaaaggctacggctctttcttgtctaacatgtaagcacattcttttcaaagagcctggaatgttcttccctagatgggcatgactggctcttttttgtggaggtcccagctaccaattccttaagggaatctacccttccttatctgttctaaagtagccacccagtttctatcatgaccctcagtttattgtcatcaacacttcattttcttcatttattgtttattccttaattgattctacttctttagtagaaattccagaagctttaaagtgttttgttcatagctgaatgcccagaacctagactaatttttgacattcaaaaaatagcttataagcatttagtacattttattaaataagaaaatagtatctcctctaatctcagaatattataaatttatattgttattatcacttaatagatttaaaaagtcatgaatgtgggagataagcccagggttatccagttatttcagtggcagagtcagaatttgagctcatgtgtttcagaccttagaactttacctatagtctttgatgtctacatcacattatgctccctcccatgtaccaaattattctcttaacttactatatcaactaatatatctataaaataatctctggcataggaatatagcattcatataataaatcattactgtaatgcgttgacaatgcattacagtaaataatgcattacttaacctgatacattattcagctgtttagatgagtcatcaacctaaaaatatctgactggctgtacagtaatgtggtaatacattcatcatagagaaattaacgtatgggttgaatattcatagtgatatgaatacaaatatgtgtatcagtaggattatggatgtatgatagtttagtatttacctagcatgtcaatggatgataacaattatctgcaaatatttctgagtgttttaatttgggtttccctagaagtagactttgagacagggaattgaggcaaggagtctatctgggaggcaatcccagggcactttggcaggaaaatggtaaaatgagacaggatgggagaggacccaataaatggtatgttatcaagcgagctatcgttatgggtatctggagtttaattctacaggggactctatgaaacagtgtagaacacacaactcagacttatcctgaccaagatgcaagggagctgggtatttatacaaaaagtcttgttaaactttggcttagggctgctctggggagcataattacttgtctcctgtctgctgtaagtgggcagcatgggttctggcagtaagagcaaaaactcagggaataaagtggagatgataacagttgaaagttggactggtatctactgaaatactgagaccatggacagctcgcaggctattaacaaggtcttctaaactactcatatatgcatggtaatctgcatgcatttctgaatgtatacatctatacgaattggaaccaacagatgaaagtaactacatgaaaactgtgaaatatagaaattacttacctgtaataggacagatagaatatacagacaatgctcttaagttcatgggtttctatttgaatgtatatgttggtgcagaccctgtgacaatctgtattttcaggaattgtaggtatatttgagaaagttatatttttatgtaatatataacagttctctttaggacttatcagtggatatcctaagaaacttttaaatattttcctatgtttattcatcccacttcacactggtatagatagatagttttttgataactcaaatctacctgtggtaagcagaataatggcccccaaagatgtccacaacctactccctggaacctgtggacttgttacctacatggcagaaggggttttgcaggtgtggttaaattaaggatcttgagatggaaagattatgatcctggattatctacatggttccagtgtctttacaggctctttataagtgaaagagagaggatgtggagtcagattcagaatggtgtgatgtgaaaaagactcatctggtcattgatggctttgaatgtggaaggaagccatgagccaaggagagcatggagcttctagaagctagaaaagggaagaaagtgtattcttctccagagccccttacaggctttgccagacaccttgatcgtagcccagtgaaaaccattttggacatttcacctgcaaagctgtaaaaaaaaatgcatttctaatgttttaagcaactaaacttgtagtactttacaccagcagcaatgagaaactaatgagctacctaataaacacagaggtaaagtcacctcaagtaaaaaaaaaaaaaacaagttaagacctatgttttaaaggtcatagcagtatttccactgtccgtatgtcactgcagtgataaatgctgtgttttgaccattgaaagaattcgaaattcgagtaagcaaaactaagttggaattctgcctaattactctctatttaacctcagataacttttaatttctctttgctttatgttcatcatctggaatatggttacagtaataatattctgacttccctcatgagttcattgtaagtattaatttgaataacctaggcgaaaggacgttgtagtctgcaacatagtacatgcaattttatttggctttgttagcaaataatagtgctaaaagaaatcagatatccaaaagacataaattaaaccacataatcctagtcaatttgtagatttctgagtatttctgtatcaaactggcaagtatatgctatatttatgatgagtaagtcataacagttaaaagattgactattaattgagagtaaaaattgtccttgttattgtcttatgcattttaatttgcattttctgtgccttaaatagaaatattttaaaacaattcatgtatgcaggaataaaagcactttagtggactattaaatggtaaacttctccacatcattcatgagggaggagttataaaactgttctaactctcaatttcctaaaactttggtaaaataatattctatctcatattctcccttctgtatgtctttatgtttgcaaagattctttggggcacagaaataaacaaatcatccctatgaaagggtcatcgtagctgccagtgaccaaaagagctgcctgctgagcagtttcatactgttactccagctgccatggactcatgcgtgaggaattcacacagctaatcaattccataaggtgcagttgctggcttctctcttcttaagcctgtacataaggaattggcacttgagtgtttcatcctgtggactctacatcattccttcacaccctctgccatttcctggccctccccaaaatagacccaaagcaaaacaataataaacaatttgctgtttgatttttagtcagcactaccattcaccagcccttaagaatgccacagcagctgcctgtcactgactgtttcagcaggatcaggctagaggtaggagaggcggggcaaaatttctcctccttgtaggttttagttaattgctgtcaatgacaactagcagttgtgcacctgtttccatgcatttagtttctaccctccatcaataaattctaacaattatttattgaacatattctatagttttggtccttaaaataacatctgattataggtactgttgttatcaaatgaggaagcagacttcacaaatagcaactgggccacaaatcttgctaccaagtgtcctagccagtggtcttggaagtctaggctctttccctatagcccccctgattttattagccaagttctaattctaacatgggaaagtcctatttcttagttatgtgtgatgtaacttagatttgtgtgtaagttattatttcttagttttgtgtgatataacttacattatcatgtacatgtgcacatttacatcttacatgggaaattttaatcagaggatgtcttcatctttgcgtcactactgaattgactaaagactcactcaaagacatttccgttttaatagtgaagagaaggaagtgattctctttgcatcttatcccttcatcctacaggcattgtgctcctactgaacactgaagagtagttttgttggcagtaaccttagaacgtttggagtcaaaagttgttgtctctattacactcagattgtagaaagtcagcaggccattcggagtgccaatatgagctatgtaaaagtcatctcaagactggaggaagagtgactcttgaggcctttattttccatataaattgtgccctctgtttcctagcacctttcaggatccggggcagcctgtctgccattttccacttgtttagggctttaaaatcgtaaagaacttcattaactccatgaaggccttcaatttaatattgaggatactggagtatttatcacagaaaagatacagctcaaaaattttaacgcaatttcatggaaaattaaaaaaataactattacattttggtaagacttgtatactgaatttttcagaatgtaagctaaattgggtttaatcttatattttataaaaacaaagaaatatgaaatttatccatttattttttttttctttatgacatattccaaatatacagaggaggacagagacctaaaagcctcagggacccatggtggggctctatcaaattctttcattttgccttatgtttccagatattgttatgagaaaaaaacttacaggtaaattgaagacccccatataagccttcagaaatctcattccccttcctccaccaagttaaccaatattctgaatttagtatttatatttttatgctttttttttacgtttacacatatcattgatctatccaactttttgtaaattatgttgtgctgaacatacattcttcaacatgttattttctgtttttgtttatgttttattttagggattaagccttgttgatgcctatagctttaatatatatgtagaaatctgttgtatgacccatgggttagcaattctctggtaaaggatattccattttcttcaaacattttgctgctgcaattagtactgtagtgaacattttgatgtttccttataaaaagaatggtggtctttttagtttgtaggaattctttgatcattctattaatcctttgtcaattatgtggttgaaatgccttgaattttcaaatttatttgtatgaaaatactgacagtagtcccttatgatttttgccatccattctataaagagctattcgcgtttcaattctaaaattctttgtaagttttctctttcattcttggaagactgtttgtttactctttagtctcttcaaagaattttgtttggttttttggctctctctatttctgtgtttatatttcactattttatactgttgctttgattaaatccttccttttagattgtttaagtacattttcattctttttctaacttcttgagttgaattaccttaaatttattattctcagtcttatagtttttaataaatgtatttcatttattaaataaatgtatccatttctcttttaacttcttcccacaagtttggaaaagtattccttttattgtaaagttctggttctctttcttttttttctttttgtcctattgggatttcctgttataacccatgggctactgaagttttcaaacgtatagaaattttttgcagaaagtttttgcagtatctattaattaacgatttctattgtaacatcatggtaaaaaaacattggttctgtaagataccaattctttgaaattgtttgtgatcttttggaacccagctggtggtcagttttcataaatagtttttgtgtatctgaaaaagatgtcaatccagacaggattttatatgtatacctatgagaagaaacttgttaaatttatgttagatcttttctattttactaaattcctgcttcccctgaagggtttaggtatgcaagtcctttagaaatctaaaggtagtaatgttaggtttataattgaaatggcttctcagtggactctacgtcttttactgtattgtgaaccctttgatgcattgttttacatttttttcttactggcattagtattactacatatataaatttttttcaagttagtatctatatagtatattttcttcagtctctattttaaactttcaaaacaaatatagttttgttttaggttattcttgtaatcatcatgtagttttataaaaatctaatttgattatcactaatatgtgagtttgataaatccacatagtcataattactgatatgtcacaacacagtaagggctgtggtcttcatttatctgaacaactgctttacatttagtttcagagatcggagtaataatgaacctttctgcatgtacccagtgttatgactcctgtaaggattaatttaaaaatgttcaatatttattttccttttggattttgctgaaaatttaattttagaaataaaaaaaatctctagttctttcaaattttccatgaattgaagattgtttaccgatctatttttttaatactgcattttggcataattttttaataaatgtttacactgtaattttcagtaattcagtgtaaagctaacaggtttttttcaaagatgaagagacacaatatgttatagaatatagtacatggtgggacagttaagtaggggttctggagtttatttttgcttctgctacttaactatgttattacaaagaaaaaaatcatgtaagagactccgccaaattctcttctgtataacaagagggagtgacatactatctcaatttcagttttcatatttaatgactcacaattggatttttggtatatatttgaccactttctaagattttattttttatgttcttgaaaattttatattctataaatatttttgtatacatatgtacctcacattcaaggtaagaaattcttaagtaattgaactttgtggctataattaaatatatacactaatagatgacagaataaagaaaatatttttattctgagagcctaattttaggtaatgaaaatcattttatgggtaaataaagtacacattttatagtgtgctaaaaaatacacaaaatttgacatttaaaacaataaaaaatattaaataacttggaatgaaaggagcatatcgaagtatttgtgaataaataatctcaaattgattttttccaacactataacatctcttttctgtttaaaagaagtttaatagttggttcaatcttttctttgagtttgttttttatattttccaagcttttaattgtcagtggagggagaggacttgagtgtttttaaggtttccatcaacatccattctcctgtattcattgttaggccaaaaggactcaacatctttgagtcttccctatttgagaccaagtctatactcagcttctaatttcagctctagcttccattcactctcagtctttgttagcattatctaagtttaggttgagattattgcattattgacttgcattataaacttcttctttcaagaataatatgaccttttaatcttgttatatatgtttacccatcatttacataaatttttattttatattccatatggttttattccaacagtcttttgtagttaaatattttatactcattcatcataaatcttcaagtaatttttagaagaattttgtaaaagtatatgacttttttaaattttgtgggtagactatatcaataaaatatttaaatatattcagaaacttcttttaaagttcatatcactttactttggtaaagagttttagcaaaagcttataattaaaatatgcgacagtgctcacagagcatttctgattactatcagaaataggggtttattctggaaagttgttttcctgaaagtcttaattgtaaaaagtgcagtttaatacctattatattcttatgtgtatattaatgccaaattaagcaatcttcctccctttctttcttccttctttcctttcctctttccttcttttcttcgtttctatatttatgctgtatacgtactacttgaaatatccagacactactatttgtttaattcacaagccatatctggtgatatggatattattgttcttgtttcatagttgaagaaactgaaactttaatgaggttggataagagccacaagtatagcagattttatagtgtataaccctgcaaagctcaaatttggattgatatctctgtttattctagaaccctcctctgtgtcattctatgtcagtttgctttgttgtttattatggtaaagtaatcattcttcacttcaacagttatctgtgagttgattctaaaacatagaaaaattttgttttaaaataaattgtatgtatgtcgtcacctaataatgggcctatgtggggtccacacaaaaccagtttgctgcagtcttggcatagtgtaaaattcccaaagtttttatatacatattgaatgcctcaaggtatattttaaaagcccttgctaatcccaaaggaattgttctaaaaatttgtttaaatgaaatttttatatattttaatatttaaattttaaataatatttttaaaaatcttaggctgaactttcagtttgtaattagcaaagtaattattatttgccccaagccagcttcctcctatttcctgaccctcatttgtcttccctccttataagatgcttaatgaaagagaacttgatttttgttcatttgtttttgagacagggtctggctctgttgcccaggatagagtgcagtggcacaattgtagctcactgcagccttgaacctgggctcaagggatcctcctgcctcagtgtcctgagtagctgggactacaagctcatggctaatgagcctggctaatttttaaattttttgtagagatgggggtctcgctgtattgcccaggatggtcttgaactcctaggctcaagcagtcctccagcttggcctcccaaagtactgggattgcaggtgtgaggaccacgcccagccttgaaacttgattgttatttacatggtgcacttaagaagcctaatcttaccttctgacccagggtttgcagtcacagtccttagagtttttgaataaagactgtgctatttcttttttttaaaagggatttgtttttatctaatttatttctgcctttatgtttactcattattaattattcaaaataagattgggatcatcatttatgtatgaataactcaaattagtttattgtaatacatagtcctggtgaagaagaacatattcagttcatgccttcaatttgcatttatcttgattagtgtttaagtgcatctcatttccctatgcttctgttttcatagcttatataactacactgttagattttatgcatgatgtaacaggatacaatcccatgatatatttccatgatgtcaaagctttgaattatgtaaataggaaacatgaagcaaaagcatactacttattcattatgcattgctatgcggcagacgcacagtcaagtgatgctatttaatctccctatctgcatattcttaaagtgcatatctctgtgatatcgaagcactcaagcaatgagtaaatttctgcatctggttaataaattcagcaaacaggagttcatcaacatctggcatctgccttattttactggctttatatgaataactgatggatggcgacctttgataaatttagtggttgcttggaattttagtaggggtttgatattgtttgtgtgctattgtgaatttaatatggcaatcaactttctcttggttgctttactcatactagaaaccacagcatcaaccaatcaaaaggctgtttagcatttggtgttatcacatataccctaatttgcacaactttccaaaatgtaagtaccaagagagaagacacatcaataaaatataggaattataaggaagaggaagaggtttttaaaagtatattattattcagcaaataatggaaactggtgctcacaaactactaaattaagagggcttttttcctttaaaaattaatgcaatgatagtgcagaacaccaaataaaaactgcatagccaaggctctggaaggttgctggtggctcctggacatcagtgggatttcacatctttctctctgacatatcatttgttcatttccagagaatgcccagctctgtgttttcttaaaaataagtttagaattctcataaaggtggacattattggcctagcatgagttaattttctctacccctggacctggaccaatcatatatataagcagagagcagaaaggtagcacagactgaggcaaggtgaggataaggtattttttgtgtgtcacagagacaccttgcttgtctcatttttgaaaatgatgaaaacaaatggtgactaataaatagaaaatgctctgtggtattatcttctagtactaatgttttcttcactgtccctggcctggtatctttcttggcatacctcacaaattacttgacttctgttttatgttgacttcactcctttacattacattattgggaagccctaggtcttagaaaactatttcttaaactgaattaaaattttgcccttgtacactggtactggctctgtcctctcagtaatagaaaagaagtcttccatatgtccacagccattatttgcaaaaagatatctctttcttcaggcttatgtttcccatgctacatctctcttgttctctgaaccacactttatacagcctgactttccatattctcactgttgctgtcatccccatctgatcattcccctctgtcttaaaatgtgacaattacaactggacataatactccatctgtgatcttctcaggacagacccaagcaggtcccagtatagtgttagcaggacatcacatttttggcttcagatgaacctgtaaatacctaaagtacctggacttttcccatgaattgttggtaggccaggatgtgtgccccattagttggggacactttctagtgacagttcctggaactctatctggctatttctctagtcaggcagtgaaggcagataaatcctcggttcctggcaggttcaggtggaacacgcagcacagtgtgcgctgttgaatgagtgttcccgagatctaatcacatggaatgcctgattgtcaaatgatgaacaaataattcaggagatggacctgggagttgaaaatttttttaacaaaaaagaaattacatatatgcatttttaacaaaagttttataatcattgatatagtgatggtagcaccagtagatattcaggcaagtaattatcaactggatgacttataaaggaattgataaagcctcccaagggattcaagaaaagggtaaagcttggaagtccctaaggataagtggctgagatgtttgattcaggacttcctgtccttgaaaccttggtcagttactagcacgtaggacagtctctattgtggaccagtaaaaagctggttgtctggagaattcagacagaaaaggtaaggctgggacccagttatcaaggctgcactacaactagggcttgtaaaagttaggggattttggaattagcgtagaaataatgtaatatggtgtaagtaacacaggctttgtaattagtgcaaaaatcataagcatatgggcttgagtcagtcttctctttcctacttactggctgcataccttttgtcagctatttaacctctctctaagcctcagcttcttcatttataaaacaaattaatattatctacactgaagtattataggagagatgataatgtattttttaaaaactagcacagaccctggtcaacaataataaacatactaataattgttactattataataaacgtgttgatatctttttcttcatcaatgactttataaaaatattgggatggagatgccaaaatctcctctgctaaatgccatctttcatcctaaggctatacaggaacaggccttgcctactgaactttgtagctataggcctactacattgcctcccacttgaaccctcggttataaacggaatggagagttacttttccattcagaaaagaaccttgatatttcagaaggaaaagttagccctggacacttgagcatttctaagaaaataggttttttttttctttttaaattgtgtacctgctgccctgaattctctagatgttctgagcactctgtatattcttactcatagcttagtaataaattatgtttataaattggagactggtattgtataatttagttcattgaaataatttgatctggtgacttcatagccagacagagtcaatggattcatataaatgagaatccagggttaatcaccatcaaacattttcaacataaagtgacatttttttccttagaatgggatttttactacattcaaattttactaatgctgtaaacatgaaaattttgagtcaggtaatgaatttgagaatggatagctaatctttaaaaatctagtaacaaatgtttctgggaattgtggctattgttcccttttggaatgatgaccaacatttttggaaatgaaaatattgataaatttgtgtggacttaaatatggagtccacacaagattggggtcataggacagaaacaatatttgtttcacatttacattgctgaggtattatgaagaggttagaaaggtgatttttatttagcttgcagaataaatattttaaaatcacagaataacatatactattaaatgcctacatacatttatatccatatgaataaaacagtagaagctgaaatataaaataacatgccactgctgctggagagatttaagccaattatctgctatcctggagcatcagacatatatatctatatctatctataatattatatatttcataatttatatatttatatatcggtataatatattgttttatacagattatattattatatgctgtttttcaccaatgttgtttacatatattatacattatttatatccggtgactacataattgtgcatggtacatcccgtctctagtcagttgtcatgacaagagttttaatcatttatgcttactttatgattctattgtacaatttttattggacattatttcagtttttattaattaacagggcatatcaaatacctccatacacactttattacagatttttttgtcccaaatatttttagcatttttttaaatatgaaaatagatagtttggaaacaagcttctatcatctactatttcttcagttatttgaatgcagatggcctatcacaggacacaagaagttgagaatgtgctaggagaattgccagcactgctcaatacaggtgtttgcccaggtctaccttttgactctctcacttgatctgttcttgtgcttctcactttcctgggcagccagtcccttactgagtatttctggccttcagtatctgcttcttccggttcctttgatgcagcacccacttgggctcgcttctgtagttcgctaaactcagttgcttatcattgtaatatttccgtaatatcagaatgactactgtctcaacttaggagacatccacttgtcttctccagcacctgactgagttcttgccatataaatttttgttgaataaattcaatgtttggcttttcacatcatcataaacaagacttacaccaacaatcatgggggaatttgaataaaattaagattaggtctgacttttgcaattttacaacttacaagttagtgttaagaaaatgtataaagatggtgatatgccattttgaaacatattaagcattttcatctttagaacagccttcaagagagttattatgaaacacatttaagcttaagaaagctgagaatcagaatgataattaataattatttgagggtggatgaaaaagtaaagaacatttacacagttttagtgagaatgtaaattagttcaatcctaaggaaaacaatatgaaaatttctcaaagaactaaaaatagaactacagtttgacccagcaaccccattactggtatgcgggtggtactatataagaggaaaagaaacatcctgtcaaacagacatctgcactcatgtttatcgcagcactatttttaatagcaaagtcatggaatcagcctaagttcctatcagcgggggactggatacagaaaatgtggtacatacacaccatggaatactatgcgtccgtaaaaggatgaaatgatgtgctttgcagcaacatggactctgctggaggccgttttcctaagtgaattaacacagaaacagaaaatcaaatacttcatgttctcacttatacgggagctaaacagtggtcatgtaagcacataaagatggaaacagtagacactggggactccaaaatggggggaaagagggaggagaacaagggttgtagaagccaaattgaagcctgaaacaatacacctttgtaacccacctgcacatgtggcccctgaatctaaaataaatcaaacaaaaaattaacaagcaaacaaaaaacagaggaactagggtttgaattaatatttctgatctgcatatcgctattttcctcttaaattatgtgcttaaatacatgaagaaggaggaggagaaaaaaacaacttaattaggagacttactttaataatgtatcatttataacttttcttccaaaatctggttacatgtcaagaaactgtataatgtgaatctctctagttcacctttcctttcctttatgtagatcttggttgcaattcagattttcttttttctaatgaacagtacaatcagtaacagttgcaccaaacatttcaatttgcaatatacatgtaatggtttttcaagtgaaggttacattttatctttttttattatccatagaataatgtgttttaggatgaaagagacactgtgtgtgtgtactccgtttaaaattaagatctgacggtctgagacatcacatacaaagcataattcagtagctatctgacagtttcccaattgctatgacactaaaaataaaccaaaccagataaatcaaccccctaagtggactctctggcctgaaatgttcgggttttaatgtgcctgtggaatgttccaatataattttcatcaatgttgattgtccagctcacacagccctgggcactagagtgattgacataaaccccgtcattattccaacaattaaatcagcaggaattagcacaaacatttttttcctgttccgtacactaaaaatgtttccatgctgcaatgttaggatttaaatgtaacaaacataatcttccctgtgttgtataactttccgatctactaagaaagcctaccaaaatggagcatttggtttaaaaataaatacctggactcttccatgtggcaacaaacaatacataagagatattggacaatgaacaattaattacattgataaaaataattgatgaattaagaatgtaaatctaaagatactttatattcctctttttggtttaactttcaaatccagaaagctcttaacctggttaactaatcgatgataacgttatacaacaaacttttgttgagtacttgctattcattccttgaacgttatttattgtaataaacgtgttaattgaggttctacatatataaaactgtttaaggtgcaatgaaacaaaaatcacctgaacttcggacaaatgtgatttttgtctttgcttaggacgtttttggaatatttacttttgaaaatgtctccatgacctgtggcagtgttttcttctgaatagtataaatgacgatggcaaatctaaaataagttatttggagccacatctagaaaataatgtgagtattccagttattagggaaggctagatttgatcaaatatatatatagttatatgtattctctctctatatatagaatatatagttacatatgttctatatatagttatatatactctctatatatagaatatatagttatatatactctctatatatagaatatatagttatatatactctatatactctatatagaatatatatataactatatatagaatatatataactatatataaatatatagttatatataactatatatagaatatatataactatatataaatatatagttatatatatttatttataaatatagttatatatactctatatagatatatactctatatagagaatatatagttatatatattctatatatatattctatatatagttatatattctatatatagatatatattctatatatagaatatatagttatatatagttatatatattctatatatataacttctatatatagttatatattctatatatagaatatatatatagaatatatgtatagaatatatagaatatataatatatagttatatatattctatatatcgaatagttatatatattcgatatatcgaatatatagttatatatattcgatatatcgaatatatagttatatatattcgatatatcgaatatatagttatatatattctatagccataatgcctattagcctggcatttagacttgcaagtgtcaacttattacttaccttgttttattttatttctttaatgatctcaaaaccttcctctctcgatttcaatctgtggtttgttcccaccatttgccgaggtctagcatcttattctttgattttcttttttcttttcttcaacttttaagttcaggggttcatgtgcaggatgtgtaggtttgttacgtaggtaaatgtgtgccatggtggtttgctgcacagatcatcctatcacataggtattaaacccagcatccattaactattcttccgatgcgttccctaccctcatacgctccccccacaacaggccccagtgtgtgttgttccctcccatgtgtgcatgtgttctcatcattcagctcccacttataagtgagaacatgcagtgtttgcttttctgctcctgcattagtttgctcaggatgatggcttccagctccatccatgtccctacaaaggacatgatctcgttcctttttatggctacatagttttccatagtgtatatgtaccacattctctttatccagtctatcattgatgggcaatgattttgtaatataatgatttatattcctttgggtatatacccagtaatgggattgcagggtcaagtggtatttctgcctctaggtatttggggaatcaccacactgtctttcagaatggttaaactaattaatactcccacaaacagtgtaaagggttcctttttctccacaacaccaccagcatgtgttgttttttgacttcttaataatagccattctgattggaataagatggtatctcattgtggttttgattttgcatttctctaatgatcagtgatattgagcttttatttcatatgtttgtcagctgcatgtatgtcttcttttgagaggcagaaataccattcgaccctgcaatcccattactgggtatatacccaaaggaatataaatcattatattataaaatcattgcccatcaatgatagactggataaagagtctctgttcatgttctttgcccactttttaatgggatttttttttcttgtaaatttaagttccttgtagactctggatattagacttttgtcagatggatagattgcagaagttttctcccattctgtaggttgtctgttaactccgatgatagtttcttttgctgtgaagaagctctttagtttaattagatcccattcgtcaatctttgcttttgttgcaatcgcttttggcgtcttcgtcatgaaatctttgcctatgcctgtgtcctcaatggtattgcctagattatcttctaggatttttgtagttttgagttttacatttaaatctttaatccatcttgagttaatttttgcatatgatgtaaggaaagggtcaagtttcaattttctgcatgtggctagccagttctcccagcaccatttattaaatagggagtcctttctctattgtttatttttgtcaggtttgtcaaaagtcagatggttgtaggtgtgtggctttattcctgggttctctgttctgttccattggtctatgtgtctcttcttgtaccagtatcctgctgttttggttactgttgacttgtagtatagtttgaaatcaggtagtgtgatgcctccagctttgtgctttttgcttaggattgtcttggctatctgggctcttttttgattccatatgaattttttaaaagtttttctaatgctgtgaagaataccaatggtagtttaatggaaatagcattgaatctatcaattactttgggcagtatggccattttcatgatattgattcttcctatccatgagcatgaaatgcttttccatttgcttgtgtcctctctgaattttttatcagtggtttgtacttctccttgaagaggtctttcacttcccttgttagctgtattagcatcttattctttcaagaggacagtttgttcagtttgtttaaattattatcaccatcacaaccattaaacctttattcagcaactgaagaatgtaccacaatatctctcatttgcaagacatattctgttcatcttctgctttctgcttctgtagcttataaagatatataaatatattttaaacccaatttgtaattatatatgatgggaattgaaaacgtgggtgattttcaaataatcactaaggaataaaatatgctaaaaataaattgtgaagaattgatatgattttctaaggatggctttactggagaaaagcagttatcctacaatagttaatatataactatttttatgattattctgttcagaatctgaatttatattattatttggggccttttttaatcaagtgaagaaaggtatattttcttttcaaactttttattttgaacattcataaattacatgaacactaaaagacataaattatctttcaggaaacattgaataaattctggattcgtctatattttattgatttgtaaaacatctcaaatttaacatagaaatgttaaaaagagattatattataacgtttgttggaaaatatgctatatttataatatttattctgtatttatatattataaatatattctatatttatatattataaacatattctatatatattataaacatattctatatttattaacatttaacattaatgttaataaatatagaatatttttcaacaaactttataatataattccctccttcaatgaactaatttttatggtggtttacatttctttttcaatgttggtttacatttgacgttaggatgtttattagttaatacaataaagtgggtggtcttttcattaatattatcagtcaggtttgtaaatagtgtatgttttgtataaccacttaaaatttatatactgatatatattttgtttaagaatacttaaaataaaaacattagttatcatttgttgaactggaaggatcattacttaaaaatccatccttaaaattaaaatgacttatgcttcactgtgtagtgcattgataaatatttagtctatagttttttctattgctatgtgtttagccaagaattgtttttaatttggtgaacagtaccttattaggaatatgaaaatttttgaagcagtcatgaaatatttaacaattaattatttaacaaacaattatgcaaaattaattttactaaagaaatatttttaaatcactgcaagaaatattttcattcaaatgagtacttacaaccaagaaagagtcttttattttttaaatgtgtataaatttaaacttcaaaatacttaaatcacttaatgcctcagagaaaatatcttaatacttatgaagtgttacgtgtactaagcattatgttaaattctataaagacatctttttaaatcatcacaagaaattacaaggcaggtgcatctattatattttttatagtagaactaattgaggcacagtgagaggaaatgatgtactcaagttccacaggtgataagtggtacagctgagtaaaattccaagtctaaaagctagtctcttaactattatatatcggcctatatgcataggccgacaagtagttatttaaagttatataaatcaagagaaaacactacaaaatttacctataggatatttatacaaaatatgggcattttattaggaaagctttctagaaatatgggggaactttaagaaacagtgaaattcaaagctatcattgtccaaaagcatgtggtcttctgtttttgcactagtgacttaggtgcaaattacttccaagatttttctcctaattgagaagtactttttaggtctagattccatggaggaggtgggtcttcgaggtggggcttcaaggtggagatagtgtcttttttctagcatgtaatgaggtaaatttgcttttgaatgaacaggtgcacctatttcaattaaggcaaattagtttccaaaggctttgctatttaagatattatagaaggctatttaaatgtgccaatttacataaaatacattttgaaagattacaggaaacaattttatataattcactgaaacaatttcacagtcctctcaaatgatgattttgaaaatgacctaaatggcaggcacctctttgaagcagctggcatgatgttatgtggtcccatggccccttacattttcaggtcaatggtaaattctccagagtccaacttcaaccctgcagtattctgttcaaaattgcccctgttcagaagcctgcatatgtaacctcttacattttgtgtttcacaatttccattgaactcttcctacacaccagaatgggcaaaaataggaatttaatttctgggaagatttcctctaagagcctctgtccaaaacatccagtgctgaaacaagaaaaggtggtcctggcatatatccactagtaatttttttgtcttcttcttttctttcctgttttatgtgtgaatagtgaaacttatcggttcaaagaccgatgagtcagaatgctgtcattttacatccaaacagtggaaatttaaattgttaaaataaaaatacacaatcactaacattaccctgatgaaataatgataagcaaagtagtcttaaattacaggctataagtgctggataaagaacaatattttaaaaatatctaaagtcatataatgaacagaagacagatttccatttatacctgaaagactggttttcagaaattataatagaacatggggatttaaaaattgtatttggatcatttattttacagttagaaagtgatgtaggaaggagttcccagaggagatgaaacagattgaaaacagcaaaattccatgacagaggtggcttgaaatagacccttttttcaaagcaataactggcctcttcatcatctatagatagcatttttggcaaaatcagaaacatttgctttgccagtcattgaaggtaaaaagaaaaaaaaaatggctgaatgcttttaaattacatttatttaatttctgctttcatacaaaggcataaaattatcagtttaaattttaaaaaatattattataaaattacatgcttagaagtctgttgattgttttcccacagccattttataactgaaaccctcaattttggatatgaatgtataataaacgcacatgttcattctaaacattttcttttcaaatacttttacattcctttaggtttcctaaagaaatgtaaattccttctgccacttagtttttgctatttttagcagtttcttaaagtctgcaaattcctttcactcagtttttgcacttagttcataatgacttcacatttgacattgattgtccacaaaaggggttatttttagtttcaaaaggtgaacgttatttgttttagaaattctcgcgtatatttcttagtctaaagataggttttctaacataaaaatgtgatagtgtagtctgtttgctgagcacttgtagtggaacaaactcagtgctaaattcttggtttttaataactaatttatttattacagtaactgctaaatatgcttcaaattataaactatttgccaaaattacagataataatataaccaaacaccatgtggatttcacctaaactagaagtaacttggtgactttcttatttaatcttttatttattgtacttggccatacttattgtatgtttatgtataaaaacataaagcaatagaagtttttacagttattatactcactgtcttataaatggagaaactgagacccagagaattttagtaacttattcaaagttacctagctggtgactagaagcaaaacacaaataagaccacagattactagttttgtcaagatcttcaacataatttaatattgctgtcaactcagaggtctcagaagataaggtcttaccatctgaaaacaacaaaaaagaaatttcataaaatcctgtttgtaccaagcaatttatttctagaatgaaagcaaaattatttttttaaagttctttagattgctgagaaatcaagagcattagggttgtgtctcccctttaaatttaccttttagtttctttgggtttaagtttttagatgaaattttaaattctatttagctctcagtttatgtgtatttaaaatttagatttaggatctattctttttaataagggtgaaattacatatggagaaatttactgtttatagcgagttttgacaactagagttgtataaccaccatccccacagtcaagatacatcacttctccccttcccaaacatattccctggtgacactttgtggtcatactcattctccgcctctagccttttacaatgacttctgttactccccctgtagatttgcctattaaagaatgttatataaaggaatcacacatcatgtagcattttgaatctggcttgctttacttgttttaatgcatttgagatttgttcctattgtggcagatatcagtagtagtcttcttttcattgttggatattccattacatgaatgtacaatcacattttatccatttgcccagctaaagaacatttgggtgttttcagttttcattattatgagtaaaccctccataaacatattgcatacaaatttttatgtgaacataagtttttgtttcacctaaacagatactatacaggactgaaattttagtaagtatatgtttaactttgtgagaaactgcccaactgtttttgcaaagtggctgtacagatttacattttcaacagcaacatgtgagagttccagttgctgcacgtccttgtgagcacttagggttgtatttttaattttatccactctaatgggtgtggagtggtgtcttattaaggttttaataagcatttctctaatttaatgcattatattacttctttttgttggtttgtaaactgcttatcttctttggtgagtttgatcaaatcatttgtccatgtttgtgtttttgattatatttcagatacaagtctttaccagttatgtgctttgtaaatgttttctcactgtttatcatttgtgtgttttatggaaagcagaatatttcgattttctggaaatataatttgtcactttaaaaattatgtaaattgctattggtattaagtgtaagaaaactttgcttcatctatgatcacaaatattttcttctgaaaaaaaagctctctgaagagtttttttttttcaatgaatgtgttttctttcttctctccatatgttatcttctgaatagctaagcaatgtttacattatttattcaggcctttccatccactttcacggattccactgaaggagaaattgggtttgaaatcctcttttctcaaaaactaatgagtcatgcatcttctcattgatattatctggctcccctgaaaacctctagtttggtccatttttagtgatatctttctactcaggttcctcaaaccaatctgtacctaagagacccccagattaaaattcaagttcattcttttaacaaattaggtgctaattgctacaaatgcaagaaaacttcaggtgctaatttgttaaaagaatgaacttgaactttagtctgggggtctcttagatatagattgaaaaggattgaaaagaattatagtttctttcacttttgccatcatacaatatgtattatttatatttcttcttcgttaatattcagttcaccttctttgtccatctttctattgaagcaccagtattcatgcagtgttttaagaatattagtccatttttatccattatgtatattgcaaataatttcgtactttattgtcttttaatttgtttgcagtgttttctgccatacaaaaattttcattttattttatattcactttaaaaaggcctttttcagcctaagagtataaatataatagcttttctacttttttcattttttaatattgcattttctctattgtgaatgttatgcttatgtttttctccagctgatctattgaggaacagtgtttttttaataaatataaatattgttatagttatttctcatttcgaagttttacggtactaatttgtctgtcttaaaacttcaaataatacttaattgaaagtctctgtctaccatcatccctttcttaacagttcggtgaatatcttttattatattgtgtaaggatgttgtattgcagctcctcttgctaggctgaacatgcagacctgttctggaaatagatgtgatcagtttaggtcacaacctgtcttgaatcacagctgacttgtagtggagagttccaggaaccttccaatcacacacaggtccctattgctccttttcttctagggctattcaacaagcagagacaaacaaaaactgatctgtcacattttactgcaggtaacagtgaccacaaatacacctgtacactgttttttttccaacattattgaggtgtgactgacaaataaaaatggtatatatttaaggtatgtgatgcgatgttttgctgtacatgtacattgtgaaatgattatcataatcatgttaacatatccatcacctcacatattgttatttttataatcacttttataaattttcccttcagtagtaaccttttgagattctgaaacacttttgagttttgaatgttgtgtcataagtgagtttttttggcaaatattttataaacatctaattgggaaactgtgagaggatgttttgtaactttcatttaaactaagatctcctctccacctccacccttcccatattcagtagattttctatggctgtatggtgtatcaggaatcatcccatatacttcagaaagtaatggaataatataaatatttttctaacatagacctacagagattaagtgatatactcaaatcataccataaatggtagtgaaagggtaaactcaacattcacagccaacttcattatctaatagggaacaacacatttcatattaataattgacttttatttttaggaggctctgttataatgaaattaaaaaatgagattagattatgtttctcaatatatggtacaaaaatcacttacatagaataacttcgattattaaaaatagaagtgaaaaatacttttcagattaaataagatttcaattttaaggcaaatatgttcattttgtgctcaaaaattagacaggaaaactataatctgttaaaatgtaggttcttgatccacccaagaaaccatggagaggtgggggacagttacctgcatttctgacagttagttcattgactcttattcgactaaactttgagaaccagtgtccaaagtatttacttacatatttatatttaaaagctgggataatcatgacaatataaaataaacaattgatgttgtattttacttggcagatagataaagctatacaagtttcctttttcctaattctaaagcataattagaaaaaaattgtatttatttcttagatatggtaactactaaaatataatttggaatgttctacttaaatgagtatacttatgtatgcagttagccgtcaataagatttagtgttctctgaactatttcatttctatgaaggtggtattaatcttgatgataaaattttcttttaaatattgagagattctgccaaaatataaatcttactgtgacaatgttgttgaaattcctttcttcatatgattatttgttctaaaatagctcccatgaaagtaaaattcctactctcaagcatcctgcttaagcatattgtattgttgctggtaactaaaaataaagcaaagcattagggtggatttcagtgtaattttatctgtttagtagagtgatacaaatgaataaattttcaaacatacaaattgaccaattatttgaaagagctatgaataaaataaataagctaccttaaaattattttaaaattatatcacaaaatttttttcctaacaacaaaatatgtatttttaattgttttggttcatacaaattaaaatacaaatataattttaccaaggaaagtgaagtaatttaggagtaattaataatatttgtgttagggaacggagcatagatactattaaacctaaccgttttatagtgcatttgtttctaaatcccttaagctggtaagtcattgatcttgcatttttctttgacaggcttatgcaagcaaagatctggaggagcagttacggtctgtgtccagtgtagatgaactcatgactgtactctacccagaatattggaaaatgtacaagtgtcagctaaggaaaggaggctggcaacataacagagaacaggccaacctcaactcaaggacagaagagactataaaatttgctgcagcacattataatacagagatcttgaaaagtaagtatgggaaataaaatgtatagtaagccttatatatcaaaccagtagaagttgccagcctggttctttaatttcagtgtttgtatcaccgaatacacctttagggcggaaagcaaatagaaaataaagaattacttcaaaatacaacattttatgatttcactttgagtattaagatgacttcataaaatacaggatagataggtccatgcataaacaacacacatttattttttcaggtgatagccattggaaaatttttaaaacagatggctatattttacatactatatctgtttaataacttaaacattctttatcttatcaaataattataccttaatttcctatctgatttggattgagaaatgcttcatttgaaatcaccttttcagatgtcacttgttgctttgctgcttcacagataactggctcagagcgggacttaagctgatgaggtatctagcataaagcttcacaaaaaatgatcatgttgcataaaatgtcatagcatcaattggtggggtatgactgggcacagaggttcatgtctgtaatccgagaccattgggaggccaaagtgggaggattgcttgaagccagagtcagagaccagcctgaacaacacagcaagacctcatctctattaaaaaaaattaaaaagtggtggagtaatttaaaaacatatttgccttcagttggtagctcttaatcgctataaaagtttgatattggaaagtattttgagaacagaggcaaacaaaatggcttcatggttgtataaccaatagtttatgtccttttccaaaaattctattttaggggaaatatgggataagtaaactagtatacttaggaagtacattatttgtaatgcagaatttaaaaagtcaacagtattataggtaagctactaactcatcagaaacaaaattccagaggagagttaaaagggataggaaatattgactttgctgaagaaagttcagaatgagtcccagttggtgaaaaatagccttgtattttatgtagctgcagccacgacattactcaaggttgccaaatagtccgcctgaaaaggacgtttgacttgaatctaaaaccatagctgtcttctcatatgcaactcagttttaaagaaaaataaaattatatttatatttgcattgagagcacaaaaatggcccatactatagagaatgaacatgactctctctgcacatcttataaacattcatatattaaattaccattttcctaagaaagaaaaaccaaacattagtgttgtgggatattggtgtacttttaataaagcataatgctaatttttcttattgcctagctatagaaatgagtttaagaaatatccttagcttgtcttttcaatgttatatcattctcattcacaagtcaatttaggatcccatcagctgtctctttagttatatattgaacttaaatgttaaaatctgaaatgaatgtgagtgatttgcagctgctgtgggctttttttatcttggtggtttccgtaaaacttactgatttccctatgacttgacaggtattgataatgagtggagaaagactcaatgcatgccacgggaggtgtgtatagatgtggggaaggagtttggagtcgcgacaaacaccttctttaaacctccatgtgtgtccgtctacagatgtgggggttgctgcaatagtgaggggctgcagtgcatgaacaccagcacgagctacctcagcaagacggtgggtattgcccattcctgctacctgcgagagcccccttaatcagaagctttaactttggggatgatgtgtttaaacttctggttgctttaaactaacttggttcaactcagggtctcatattttctttaggggaatgaagtcagtttttcagtgttttgtgtgtttgacaacacagtgtcacaaagaaagtaattgatgctttattactttgcaaactcttcatatagtggagtcaaagcctcatgcagaaaacaataaatatacgtatgtatgtgtgtacatgtacgtgtgtatgtgtgtgtgttgatcttcaagaataaacatgttcatttggcaataaaatacttttaaatgggtgagttttcagatggtggagataacagtgcaaacagtattcaaagtgtaaaattaaatgcgtgtgttctgtgaaacagtggtatagtattgaaataagccatctcactgaagaaatttattgtcttcctgtcgaaagcaaaggaaataactctgacactaaatctcagatgttttgaataaactgggaagtttatctcattaaatggtaagcttctgataaccaggaaatgtctcttaaggttggctttggatcagggattttcagaccagacacataaacccgctttgtgggccttacgtggtagaggaggctggctgtggaacacgcgtatgtgctggcgataaccatgaaagtgttgtttgaaattgtgtgcacctctggcctctgaacagaaatgtttggagaaatccagtcccgtgggctggactgaagcaaacttctcccgaaagacaaaactgtggttgtcctaatgacctttctaagctatttttggagttagactcacacacgtaaatctggctaaattcagaactgttctttgacctggagaatgaaaaatgaaattgaaagatgtggtgttagatttgatttgtatgatgtggtatgacagaaaattcacattttaattttatgcaaactttagctgatctacatggttttcagtaataaaacctactcttatttcaatatagtattaatagaaatcagagttaagattactatctcaattccatgaactacattttttcagctagctgaatatttccaaaatttttactgttacgatcatttggcctctgagtttggagacattgtcttattatacaacccaaattaattgctttcttttcaaaaattgagtttctttatattgctcacccacttgataaagaaacaagccattttagattaagacttgcaagaagaaacaaaaaataaattataaagctaaattttctattcagcttgcctctgcctcaactctaaaggttaaaaaaaattaaaaggtgatgctttggggcctgctatcatttcttttagtatcatagttagttaagcttagccagatgcaattcattctgattatttcctaaaagcacagcaaaataatgtaggggtcgttccaacatgtgttctcaaggaatacaatgtgactctaaacatagtcctgcatttagaaactttaccagaaaaatgtacagttgtaggaacatgacaatatttcagtggttgccaaaattataatatttttgatagactaacatataattatactattggacatagcaaaagttatccttagttcatttatcctccctgagtctttatcaaacaacaataaacaataagacgttatagttttgtacttactattctaaataaattaatactactttaacaggttttattggtattatgtattttatcataaccctgaaatcaaacaggattctttaagatcctctaaattttagaactgcatactttaaaataaattaaatagaaatacttaggccaagcagatattctttgaaaggtaatattcatttttaaaacatattaataattaaaatgttgtttttatcttcaagccaaacctcttaatgggaattttggtatactgagtctcttgagaaatatgtcatttccttttaaagttagagaaaataaatatggatgatttaggaattgaaatatacaatttttggaatgccgttaatgatttatattttaaaataattcagttaagcaatatgatgtattctagattatattcctaatatggtatttgatttaaatcaaatagtaaaccaaggtactttggatactgtttccaactaataagataaccttctctctgctcttcctccttccatttcctttcttcataatcttttctataaattactttcaagcatattttttaaaaacatagatccaaatctatggctaggcatggtggctcacgcctgtggtctcagctgctgaggaggcagaggcaggaggatcgctggagcccaggagttcagggctgcagtgtgctaggattgcaccactgcactcccagcctaggtgacagagcatgaccctgtttcaaaaacaaaaaaaccccacagagctgatgtcagtctccagcataaaggcctttcagtgatttcccattgcttgtaaaataagacaaaaatcttttttgaaggttatatttattgacatatcatagctgtacatattttggggtcatgtgttatatgttgatacctgtacaaaatgtgtaatgatcaaatcagggtaattgggatatccatcatctcaaacatttatcttttctttctattgggaacaatacagtacttctcttgcagctttttaaaaaatatacaatatatcgttattcactccaatttccctgatgtactattgaacactaaaacttactccttctatttaactgtgcttttgtacccctcaaccatcctctctccatcctccctacccttgcccctcccagcctctgataatcagtattcttctctctacttccatgagatccactcgtttagctcccacataaatgagaacatgcaggattttcaagaccacatctttatcacaacctgcaatctctgccccatagcccctgttcagcatcatctaatgtaatgattcttgatcttgtgcttccagtgctctagactttctccaattcctgggcatcatcgtgtttcctctgctcctgggcccttgcacacacacctttaggttaacctggccttcctgtctcctctttcctgaggtgctagctcttcagatcttaatttgggtgtcaagtggctttggcaaggcctcaggcaagactttctgacctatttggattagacccaatatttgtagtaaatgctttatagtttcccatatttttaaaatagtatttattacagcctataatcacatagtttatagttatgtagtcattgttacttgattaatgtctccctcctccacaaaggcaaaaacagatccgttcactacttatcccagtgcctaccacagaatcagtgcacaaatctcttttagtatcacataaaaactgtggaccctttcatgagaacaaatgaaaatatagacacatccacagcatttccccccacagttttagggagtttgttccctgacccctagccttttccctttaaaccaggctttaaaactgctgccttgaagattattaataataaaatagctgattaacacacttgtggaattttcaaataattggtctttttgctaaacaaacgtttatgctatcaatttagcttgatcttttaaaaaatatctgtttctggagaggaacagaaaaggtaactattgggtactgggcttaattcctgggtgatgaaataatctgtgcaacaacccccatgacatgagtttacctatgtcacaaacctgcacatgcacccccaaacctaaaataaaagtttacctatttaacaaacctgcacatggacccccaaacctaaaataaaagtttacctatgtaacaaacctgcacatggacccccaaacctaaaataaaaccccaaacctaaaataaaagtttatgtcacaaacctgcacatgcacccccaaacctaaaataaaaccccaaacctaaaataaaagtttacctatgtcacaaacctgcacatgcacccccaaacctaaaataaaagtttacctgtgtcgcaaatctgcatatgcaccgcgaaacctaaaataaaagtttacctatgtcacaaatctgcacatggacccccaaacctaaaataaaagtttacctatgtcacaaacctgcacatggacccccaaacctaaaataaaaccccaaacttaaaataaaagtttacctatgtcacaaacctgcacatggacccacaaacctgcacatggacccccaaacctaaaataaaaccccaaacctaaaataaaagtttacctatgtcacaaacctgcacatgcacccccaaacctaaaataaaagtttacgtatgtaacaaacctgcacatggacccccaaacctaaatataaactttatatatgtatgtatatatatacatatgtatatacagatatacatatatgtatctgtaaaagaaacatatctatctatatctatatctagatatccagatgactagatgagatatagatatctgtttctcttacagataaggaagaaaattcttctttattctctcattcattagttaatatgagcaaaagccaacattatatctttcttactattggtcaaccaaataaatgcatactttacatatgggccaaatagatacctaagcataccttaggtaaaatctaaacttggaaaacagaaaatcagtacattgttagtaagcaaagtaaataaatttagtcttctattaaccatttgagttttttctgtgaccattgcatattcattttctgcattggtctaattaggtgtcacattcacccagtgggtattggagtgaaagtatttattcaagggtaggtgtgtatgctcagtagcataaaaattgctctatcaagagggaggtgttggagaggtttaggctttagaaattgcaaggcttcgctgggcactgtggcttacacctgtaatcccagcactttgggatgccaagacaggcagatctcttgagcttaggaattggagaccagcctgggcaacatagtgaaaccctgtctccccaaaaaagtataaaaattagccaggcatggtgttgtgcacctgtggtcccagctacgcgggaggtagctgaggtgggaggattgctggatcctggaaggcagaggctgcagtgagtaaagatcgcagcactgcactccagcctgggtgacagagccagaccctgcctcaaaaaaaaaaaaaacaaaaaaaaaacaaaagaaaaaaattacaaggggccaggggtaagatgagcatttagtgctaagtgtaagctgcatataggtgaaataattttgcccagtctacttagtacttaaacatcagatatttgctataagaaaattgtctactttagatcacatggaatcttttcttgctgtatttcatctctttcacctcccagctttgcagaatttaggcttacttttataatagatttacaatgttgatatgagttttgtcaacttcttcccaatcatttgcttgtgtgaaaaatcaggacttgcccatgaaatttctgaagtttgtctgcttttttgttattggttgatttttttttcagttttttttctatcctattggtgggctatatatttacaataatcacaatatttatacattctgatctgtaatgcagtcatattttaaaatttatatagcattagtttttattttgtcattttaattttttaaagatttgaagattttgagaattaaaaatttgtagttcatcaaaaatatggtatttctcctgagaattctgacctaagacaccttctctgcagactgtaactctccttgtattttctcatctacttttttttacttttcccaaacctttccctccaattcaggcttctttcctgatttctatactgtccactcaaccttgtgacttggctgtccctcagacaggtcagtctgtctcacttaacagttagaacctattccctaccaccttgcccaaataagcaagtaagtgaatcctattctttttccagtgttctgtgtcttagtaaatgacatcatcattcagccagtcggtcaagccaagttattcttcctttcaccaaaactaattgctattcaatctaccttgcaaacatctctaggacctatccagtgtctccacgctgctaatcccgctctgatctaggtcacatttaccccttacctagaccattcctcttggacaagcctaataactggtctcctacctccattcttcctttcctccaatctatttgccactttttagcagtgatttttttttcttttcttaatgctaagtcagatactgctaaaaactccttgataacattgccttattgggatggagccagcattcaactagtgtggtgataagcttatcttttctaattgggttgcttaggccagcatctggtcagattgattggtacaaatgttctaagttgttagtgttttgaatggaactcttctttcagacaaaatcccttaaacataatttcctgggccctcaatgatctggatgctacctaagtgtccagcctcaaatgtcaatgcttttccccacaaacactacttaccactaagacccaaattcttttcacttcttgggttatgtcaatatctgtcacctccagtattgcaatgctgtactctgtgtttgaaacatctccctacacatgatcccgtatctcgatgtatctagttaatgtctactcatccttaggcctaaacataaatgtgacttccaggacattctgttatgtgcttccacagcatccattgttgctgtatcttagcatcattaccttatctgtcagattgttttatctttgtttaattccctaggttttttttttttttttttttttagatggagtctcactcttgttgcccaggtgggggagtgcagtggcaggaactcagctcactgtgacctctgcctcctgggttcaagtgattatcttgcctcagcctcccaagtagctgggattgcaggtgtgcaccaccacacctggctaattttttgtatttgtagtagagatggggtttcaccatgttagccaggctggtctagaaactcctgacctcaggtgatcctcccacctctgcctcccaaagtgctgggattacaggtgtgagccactgcacccagtcttattccataggttctagactccatgaaaacaaagattgcgtctgcttgttacactgaacaatagcacagtagttggcacatagcaaacacttagaagtgaataaaatgaatatttgaataaaaagaaacaaatttggggtcaaaggtcaaattttgaatatgctgatttgaaagagtctgaatggtgtttaggtggagataccagaaggtttgatgtacaattctaaaattttagaacaataactgggtctttaaatatagatttgggaggaagcatcattctgataaatgtcatttgaagcctggtgtgcttattaattcttagggtattgatgtatcacaagagaagagcaaacatcagtaccaagggaaagccaacattcatcattagctgtgccctgcatttccctctttgattttgtattatcatgcccttttcctatccaaaggattcgcttatatttttgtttatagtataaggaatttttttttttttgaaacggagtctcactcttgtcacccaggctggagtgcaatggtgtgatcttggctcactgcaacctccacctcctgggttcaagcgattctcctgcctcagcctcccgagtagctgggattacaggtgtccaccaccacgcccagctgattttgtattttaatagagataggttttcaccacgttggccaggctggtctcgaactcctgacttcaagtgatccactcgcctcggccacccaatgtgctgggattacaggcatgagccaccgcacccggcagatagttttaatttaaattcagttagacaagtgcatgtggtacacccattatgtgacgcttcatattatgtactaaaagcatgctatgcacaaagtgtaggtgtacagtgatggatagatcctgccctatggaactaacaaattagcaagcgaaatcaacatttatcaagtaattaaaagtagtttaagtgttgtgaaggaaaagtacaaaggcttatggaagtgcatatccaggatgtttataaaccaagggaggtcgaggcataaaatttctgaaagcaagaatgcagtgttcctacatttttactaatattccaagttctgaaaacgtgtacttaagtagcagcttttcctgagtttattcaatttattgcattatcagtgtagtatgaatgggagtgtgtgatgatttccttcaaatataaaaggaaatttcttaatgctgtgttttcttaaggtaaaaaaaaacaaaaaaaagacttttcgttttgttaaaagagttccaggcacattttgtagcaaagccaccaattggcatgatgtaaattgtaaggacaatgtaccttaggtaatgttaaactcaagttttttatagatacttcatagaaatgcttttttaaaatgggactcaatgaaggggaggttatcagggcgtgtgaggaagccagctgttcattgaaaagtaaaagcatatgcactgtgcattccaaagtatactaatggataaaaactgcttcaaagttctccacacaagtatctaagtggctttgaaaagttaagtagattggatgtcttttcaacctctttcataaacatacactttgagtatattttcttatgagaagttgtatgtttaagagatataaccaaaaagtagaaaatgaattttgcagggggtaaattatttggtgatgaaagcagaagcagaagaaagtcatctgcttttgaggcacacatttggattaaaagttacttgaatgttagtatttaccttatatattttactaaatctaggaaagaataaagaaaaacagctcaatctctagagtcttcctgaaaatggtggggttaaatcaagctcaaggaactagaagttctttgctgtgttcattagtgccagactaaagaagccagtttagttaagaagctagcttgctatgagctaattctgatacatagaagcagcattattttaaattctacattgccatcttaaaaacaagcagctacttctttttcattattttataaagcaataatatgagcaatcaataatatgagcatgtatattaacaaagacatgctcgattatatttaagttggatgtttcataaaattttacaacaaaaaatatttaaacctaagtaaaatatgcaactatataatgaaattagaggtattattttgcactgcagtcagagatatttcttccattaattaaacagaatactgcagcagtctggaagattaatttattacattcctttgtattcagcaagtggaacgtgatttgtattgtatctttagcaagttaatatttggcaagcacagtttttggaaatcaggttttatcctgatgtggaaaaagaactctatgccagtaccagttatcagaactttctttaagaataacatttgccttaagaacataattaatgcatctgtgaaaaataccacttttttccaacccaaggtacaatgagattcacgtattttattcagtatttctaaaactcttcaattgaggtttttattttaattgtggtactgtgtatactttttatgcataacaatatgttaaaattaattcagtaccagatttaaatctgttaggctatctgttattccattttctttcccaaacccaatttaagttccacaggccttttatagctggccatgtggttgcaatgctaagtcaaaatgctaagaccttttcccattttggggcattatttctttaaattcgttgtagttttaaaatctgattttatagttattaatcatattcttctgggggtacatatatctgtacttaatggactaaagtttggaatatttaaatttaaattaaatatggtagtgagatttgttctgaagagaaactggttatatttaggatataatggtgttttaaaggaaggcattttttgtgtcatatttgtatccacacaaacattacttataatttagtactaaattataactcaagatcctctcagtaaggaagttctacacctttttcttgaatagccagcaagataagtacgattaggaattgttgctttatagccgttgctatgctgctgtaaacaacctattgtttcaaaatgtggctttatttgaagtccattcttgttggtgagaattgactattaaatattcctattaaagaatgccagtagattacaactgggaacctctcagttggaaacacttgccatttcctcttgtttattatagttttacagaatatacagtcagatttttttttcagtttccaaccttgcttaaatgcctttttttatatgtccttttgatcttctccaaaaccaacaactggtattatatgcctaaagtatatgtcaggcttcataatgaattgtattattacaactttttttgtgtcctacattggacacaagttaatattacttattggttcagaacaattcactttattgtataaaactgttttagaaaaatcataattttcaaaatatcaaattataatagatacattatcagttaaatacatcatcaatcagtatttactaaataaacatacttggagctattagctagtgctgaataatacataaattttatgtgctatgaacttaaatgtagaacagaaaatactattatatacacaataaagcacaaaatagtctgacaatagtatcatgattcatattttcttaaaataatctacttactgtttcaaacattgatatgtttggatagatctaaactcttttgagaggaaattctagttactatgttagttcagatcattattaatggcaagaacaaattgcataagggaattaaactccagtgtttacggtaagctatttggtatttcagaaattctaccatagtatctctctctgtgtatatgtatgttctcattcaccctcaccgtgaggtctctttttttttctttttcttttttttttttttttttttttcggagagggagtccacctctgttggccaggctggagtgcaggtgcagtggtgcaatctgggctcactgcaacctctgcctcccgggttcaagaaactctcctgcctcagcctcccaagtagctgggattacaggcatccgccacgccacccagctaattttagtatttttagtagaaacgggatttcaccatgttgggccggctggtcttgaactcctgacctcaagtgatcctcccacctcagcctcccaaagtgctggggttacaggcgtgagtcaccatgccccgccctcattgttaggtttctgatcagcatagaggcaaggtcattactgatgactgttatcctgagattctagcaaggtgcttggtatcatgtaggtactgaataaatagttactgaaaactaaacaaggaaagattttaaataaaaattttaaaatttagaatttctttaacaaaaatttaactaaatcttggctgatgtgaatgatgataaagaacaagagaaagaagaggaggaagagaaatccaaacattacactgaaatcaccattattattatccctattttataggtaatgaaatggaggcttggggaagttaggtaatttttccaagtctcagaagtagtaaattgaagatccaggactctaattactgtctgtttctcaagactaagtaaactcttgtttattcttacatacttcgtggagtagggaagttgccagtgatttgaaaatgttatgtatttattttgggagggcgccatgcaagtttataatgcacttctaattattattttttcagttcaaaaaatgtatattttctaagcacatactatctaggaaaaaaagcttacggaaattcttagtaacgtagggattaaatatagctatgtaaaaattcacaaagtggtctgtaaacaagaaaatagaatttactatatttattgaaaaggcagtagaaactgtaatcatgtctaactgataagagtaagtcagtcaatatacacacatgagaccagcacagaaagaattagaaaaattaaagaggcctctttagtatgtgacaagagctggtataggtacaattatatcttaatacatacccagatggcatattcccagtagatattactaattttcctgaagttgatagataaataaaactcaattatcaagactctttctacttttaatattatcaaaggtatctttctctggactcttaaaattttttcacactggtatcatcaagtagcaggtcaaaatttagggatagaggatgtgtttcaagagaagaacaaaattttttaactttaatttttcaatctctgttccttttgacaaaattaactgaattcagcctgccaattgctacttagacacaaaaaagagaaatgagacattagttattaagattttgattttgattcctttatgttgtgatttcctttatttcctttaagtagttaaactgcaacaaagatttttttctctccaactgtaaaaaagtcttccattttaccacttataaaagtcttcaacttagaggaaaagacagttctctaaacagtgatttggttttagtgctgttttacctgtctccttattcttttagtcagtgtattcaaaaacacatttcttgcagcctttgaaagcatagagccacacttagttttccaggaagatgctttcttaatgtgaattagctattcttcatctcaccagaacattcttcaaagctgctgttcctgaattcatgcttgatacccatgggtggatcctgatttgtgaacattatctacctaggcatggatgaggtctctccatgatcactgatactgctcacggcaatctgtctaccatttggaaaacaggctggggcagaatctggaagggcagccatcagtgggagcaggaatgatgctgccaagggttaggggtgggaaaacataaactcttctacaatagctgttagttatctcaaatagtgccttaccttcactatcaggctctgtcctgcctggtttcactggagacaatgccaaatcctgctgtgcttacttattactttgtttttgcattgctataaaggaatacctaagactgggtagtttataaagaaaataggcttaattggcttatggttctgcaggctgtacaggaagcatgatgctggcatttgctcaccttctggtgatgcctcaggaagcttgcaatcttggtggaagggggcgctggtgtgtcatatggccagagtgtgagcaagagagggaagggagaggtctcagactcctttaaacaaccagctctagcatgaactaacaggaaaatctcacttcttaccgaaggatggtgctaagccattcatgagggatctggtcccatgacccattcatctcccgccagctcccacctctaacattgggaatcacatttcaacatgagatttggaggagacacagatccaaaccatatcagattacaaacactgtgcgtgtaagcaaaattgtttctgctggtctgagccacttgagccctttcccactagtcacatggagcacctcttcttgtcccccgtctccactgctgcttccttcctacagcccctgccctgccacagcccttggaaccacatcgggtgctggttatctcctgtcaattcttgttacatttgacttcccgaagacatgtggccctgtgaccacacacacctgtttgaagctctcccctctttctctggcacccgttggcttgacagtctcccctcctgatgctccatcattgttatgcttcttcccagacatattcactagttcctttgcctcttcccacctcatagatgttcctgtgccccaggtttctattcttagacattttctcttttcatttagagtgctcatcaagtaatctcatcaatgtccaagactccaattacagcttaaatgttcatgacttttcaatggctctcctaaactctagacacacatatgtgactgcctactagacctaaattcttaggtacaccttcctaccatctacattattgcagagcttaaataatcaaattataaattatacaaatataaaaaataagtaattttataaatttattaaaaattgctttttaaaaccactttgtatgtcttctgtagtgctagttcttaatatagattccatagatgtcttaaaagatagaaaaattgtagcttatgaagacactgcagaattctctcttaaaataggtatatatagtgcaaaggattactgccattgcaatatttcacctaatcaaagattttatccaacgtgtataaacgggtatctttttagataagaaactggtcaaaatcataatagtggcatatgttgaggtcacatagtgaagttatctatgcagatcagacagtattgtggagaatacctagaatcttgagaatttacacaaatagtaataacttagatctgtatagcaaataatatacatatcagattcatttagtttatgtaatctttataatctgagaataatgagtcaagtgttatccttagtttactgattatcaaagaaaaatacagcttggagaagtcaaatgaattttccaaatttatgctacttataaatgggagagctaataaaagccacctgtctgggtataaccctgtacctatttcttctaaagcatattgttttctaaagaaagtagttacattttaaatgaatatataaggaatacatcttgaatgaagacaatatgcattttataatttacatatttctgtatttcattattcagaattcatttaaaaagtctccttgttggcatggacaaaattggcagctaatcctatcccataaatattttcaatggtcttcagctgatggcgtgaaagttcagcaaaggccaagtcacaatgctttgaagtttgtcatcttttttatcactgctcagattgtcatgaagacaccaagtaatacatggatcaattatagttaaatgactgcaagttgatcttatcaagcagttagtgggcaagatttcacttttaccattttttctggtaatgatttagagtgtaagaacactaggaatttaaatctacttagttttacttaatcaatgatgtatttgtttatttaatttaaaacattgtttttggagaaggaagagaacacaagaagttcttgatccataaataaggcgttcagaaggagaccagttaaactaaattttgactgtaattcagaattgtgtaaaatgccctactttattttaagctcattattttcataattcctttaccaagatagcagaaacatggctttatctattaaattataaatgtagttttttttgttttaaacataatcaatttataagagatctaagacatataaaactacattgaggtagaaatttaataaaaattaactttacatctatgtaacttacgtctatgtattcagtttatttaaagtaggtcataaccaagtatttctgggttgtgtggccaatagctttgctcctaaatcacaaagatgtttctgtgtgtgacactttttaaatccctggaatattttaaatgttcatttcaaataatctataactttgaaacagttcttttttcttgaacacattgttctgtcacgtctaataggataaccaattagttggttatcctaattctaatatgcttcataactagtgacataagataaacatatggagtatttattactctgataaaagatactggttaggagcaagacagtttttactttgtaatcataaaaacatagcgtcctgcgtacactaggcagctacttatatagagctaatctcactctttttcggactccaatatttaccataaaagtgctttacagcatctatataattttttcttctttttgtcccttctttgtagttatttgaaattacagtgcctctctctcaaggccccaaaccagtaacaatcagttttgccaatcacacttcctgccgatgcatgtctaaactggatgtttacagacaagttcattccattattagacgttccctgccagcaacactaccacagtgagtatgaattaaatctattttttctgcatcctctactaatattaaattattttcaagtaaacataagttaaacaaataacctctgtgaaatttactgtaatatactctgcttcaaatacaaaacaaagacaaaattttgtatagtatacaatgaaaataaactgaaaattaaaattcagtgggaagcgtattttagaggcaaagtaattcacaatataaaagaagtatgtctgtgaaataaaacacattccaccagtgttcataaaatatcagtaaggtagcttaattgatttaacattcctgaaatcaggtatgctaactcataaatcatattaaagttcaaaacatttcagccttgataagattttaggccaaaacaaaaagtaaatataaataattttatatctattagcattcagttgctttcttcaatctcaaacataaaaatatatatgtgtgtgtgtgtatatgtgtatatatgtatctccatgtttcttatttcagcaatatttgaatagtgaaatagtgcttaattacttgaaaaaaatttctgttaatatcatttcaaattgacattcaaaccattatttgttattcaggtttcctttccatcctatttttttggaggggcaaatggcagcatatacctcatgtgatcatataggagaacttatcacgttctcctgtatgatcatgttctgaccctgtgaatagctgataatgaattaatatgcattactgcctaagatctgagagttttctgccccaaagtagggatgcaaccctttgttccttaggatatccggtgcatatggatgaaacttacataactctagcatttgtaacaaatgtataaataaattgatcaaaatacatatatattacaaaaaagaaaaccttacatttttaaaagactcaacaataaatgtaatatgcaaaccatggttttccccactgaatcacgttgtactactctgcttagtgtggcagatagggggaccccttgtttgtccagggacagtttaggaaaacctggaagatagcctaatttgagtgacagagatctgtccccttttatgtgagaaagcaaagatcttacagacatttgtgaataaatgtatgctaatacaagcaagagaccactaccatctgaactcaagaggatgccgtatgtgcaatttcatccccgcaggctagagagttctgttcaccttcctcagccctgagcagaagccctcagtgactcctccattctgagagctttagccattatctccatactcatggcttccaaaatgacatttgaagatctaaccatatttttgacttataatattttatctaaatctatcttctattgctttgcttgtaattatattagctgtaagtacaaagagaaagacttgttaaatcctttatttctacattattcatggcagtgttttctcattttctttgaggccttgaaatcacagagttgtcattacttcttcttcttcttctatcccatctaaacacaattgattattttggaggagggggagatatgtgttccaagctaaacttatatttcatttccatcactgccattatcatccacttcattatgcatgtctctgatctaatgcagtgatattaatactagttttcaagcatcaagtctttctcctgttgtataatgtcactgttttatgaagtaagctttaaaaggcatcgtttcattcatctcaccagaaacagtgactttcagttgctcaaagaactgagcacaaatttctcaccaccctattctggtgtcagccttcctttcttgttttgtcttccattattcacccagtctgtgtttcaccaagtccgattcccagaacgccaagctcatttcctgctctgtatcttgtttctattctggccctggcttgtgttctgcctttccaaagccctctccatttctcagagttcaggtaaaggtctttctcctgcatttgtcttgtccgaataccacggccaactttgcttcttgaatacccatagcactcactggattaacttcatcctcacatggctttatcagggtctgcaaatgttgcatgtggaactggattatgagagtgtttccagtaagtttatattgtctgcaacattcagctaacaacactcaaaaatacttgagccattcctgtgctctcagcccctttacctgcattgtctgatttaacccttaacaaaatcatctagaaggtcagcagcagcatttgccttattttacagataaaggtggaaatcacactccaaagctgttggctaaataatgtacataaatgcttgttaaataaaatgactcatttcctggatgtattttatagcatttgccatgttttcatcattacttattcatataactactatcctatacactgtttgaggtcaagaagagacaggaagctacagcaaaaagagcctgagtcttagagtaagccatacctgattctgaattcagatttgccactaattcattctctgtgatcaggtaggtgttttatgtctctgaaactcagtttacttatatataaactgtaaagatgtaaagaggattgaatgaagtactgaatgcttatgcaatgcttagcagagtgtctggtatccagaaggtagtcattaaagggcaaatttattattaccattaatatctaagtctgattcatttcctcacccatgtgtttttcagtatttttaaaaccactatctacagtaagaaaaacattttatattccaaaccaggatgtgtggtatacacacacatagtgtgtctctgtgtatatatatatgtcgatattagagaattttaaattagctagataacttcacatgtaattaattatgtataagcataaaactaaaacaaattaccatttaaaaatattgtccttaattatggtgctgctcaagctttctcattatcacaaccccaaggatccttttataaacattttttccctaatcactttccccataaaattttaatgtaacaaatatactctgtctttatactatatgtatctctgtgctttatacataaaaaggaagtgtaaagtttacttttttgttcaatgtagtgttaaataacaaataaaatgtttaagttaacatttaaattaaaaatttttaatctcttaacagctaacataaatttataattgtatttgccaggaaacttttaaggtaatctgtttacttatataaattgtaatatatcaaattacatatgcaaagtaacaattgatatgaatatataatacaaatataataatttataaaaacattcaaaatcactatttttccagcaaaagtaaaataatttttaaaataacttctttaaaaatatttggagagcttaactattaactttgctcagtatgagaaaacttttaacttatatagatgataaatattaatttagatattgtcaactttttcttttcatcatttgacatgtaatggtatgactaacatttgtagaattaataataaaatataaattattattatttaattctcaaagctcaagtcacacatgaaaacaccaaggaccaagcataagcaatatccacagggcaaccaatggcagccaataggcccacataggtaccactcagtatatgtttgaaatcactcagtcaattaagagaaaatcctccagtcatagccatctagtcaccataatttcatagctcatatattgcaaacacttggggtgtgttccgttgccaatgctgttcatgtaatggccaataaaaccaaatagaatttaagtattaaggaatattattttcttgggttttggagagccaaaaatcattgagatattaagattttagccccatccaggcctcatacccaatttttacccccttagagatgattttactccctttatgaatatttgccttattattacgtgtgatatacccaaataatttttctattctgtttttctttgtgaaaatattggtctcaaccctttatgaattatggcccacaattcaataaaagctacactagtgataatatatatatgatggacatgtgactatgttataaaattctaacatttgttaagatttaagaggaacaatcaccaccacggtggctaaaattaaaaacactgacaaaaacaagtgttagaatgtggtgcaaccaaaactcctatgtcaccaatgggcattaaaattgttcaatcatttttcaaaacagttgacagtttcttatgaatttaacatgtacatatttccacacaataacttgtgtacaaatgttctttattagtcaataactggaaacaactcaaatgcccatgaaagatgagtggattaacacatcttagtatatgcatacagtggaacattgctgagcaatgtaaaaagaatgaactactgatacacacaagaacataaaaggatctcagagacattaagttgagtgaaataagcttggctaaaaagagtacattctctatgatttgatttacatgaggcccttaaaagacgcaaatgtactctagagtgagagaacgcaattcagtgtttgtttgaggatttggatcaggattgactgacaatgggcaagagagacattgtgaggtgttagaaacattctttattttgattgtgacagtagttaatgtggatacataaacttacgaaaagatgataaattcaaaataggagcatgttattgtatgcaaattattccccaataaaattgatttttgaaaagcctagaaaagaattcctttattaagtacaattttttaagtagcttaggtttcaaatagtagatttctctttttttttttttttttttttttttttttgagacagattctcactctatcacccaggctggagtacaatgacgtgatctcagctcactgcaacctcctcctcctgggttcaagcaattctctgcctcatcctcccgagtagctgtgattacagttgcccgccaccatgcctggttaatttttgtatttttagtagagatggggtttcaccattctggccaggctggtcttgaactcctgaccttgtgatctacccgcctcggcctcccaaagtgctgggattgcaggcatgagccaccacgcccagccaaaatagtagattttttaaaacctttacaataacattttaagtcaaatctttgattagggagggagatttcccacagtcatccaaaaactatacgttgagtcactaagataaagaatgcttctagatcctattagagaaaacaaagatgcgcttggctggctctgaacttagagcacttatagtcaagtaagaacaacacatattatagttacattattattgttttattttactaaatattacaaagcaccaagcatctgccacacattgtctcatgttcatacaaatactgccggtggctccattcgtaatacacatcacatagtacaaggctgaagagtgtggatgctgtagggagcttccagttttgagaatttagtctctgatttctctttgagtttgagtaggttctgtaaactttcttgtgacacattttttttaatctacaaaagagcacataagtaagaatgttacatataacatcatacagaatatttataagctaatcttcactgaaatcaatctgttcaatagcattataccatatttgacataccatagccatgttaatctgatattgtagaatagcatagtataataataataactcctaactcaaggatgttgtgatctttataaccagcaatccatgttaaatattagcacagtgcctaaaacatattaagcattcaataaatgatcgctactatttttactaacatcctacagatttggaaattgagtcttagaaatgttaatgtgtaaaatgctaaagagccaaaaaaactgccaggaaaatataaaaattaaaatcattttatttctgaaacccatgtgttccccccaatatcttctaacatttctagtatttacagaaaaactttcaagtctcaatatcagaaagtttcataaaagccagaggaagtagcaattctctttagcagacagagttagataccaattttcatattggtgttctcacagattattttttccaattatttcctctcatattttcttcaaatttaactccatgtatttccatgggccctttagtagagactttcttttcatggagggagtcatttgtgattaagtagcgatcccctagattttcctccttggtagtagtgtttgtttattcattcatgagacatttatgtcaggtcttctatctctataatactgtattaggaaatgtggggtatttttaaatgaataatataattctttagctaaaataactcatgtactagagtacaaacaaacaatatttctagtatagtaagtgtctaaaacactatgctgtacttcattcactcattcaacaaatagcatttgtgtttctgctagatactaataaggtggttagaccacagagatagaaagatacatagaattgttactccagaagaaattccattcttgaaccagacatgtaaacatatgactgaaatcagtgaaatcagtgtggtgaggaagcatcttggagacatggctacagtagagaggggatacatgagtctggagaggtcaacagaatcacatatgcccagccaaggatgggctgtttcttaaagtctcttgagaactactaaaagtatatatgcagagatgtggtatctgcagttttgtattatagaaagaacagcttggtggcaagggagtgtgtggattagaggaagcaaaacgggaggtggaaaaattcgggagtaatcatttgaaataatctgagtgaaaaataataaagatggtggccacagcagtggatatggggatagaaagaaaagaggtggaaaagacgtttgaaatacaagaaagcatatgacttgggaaccgcatatgggggatggtaaagtgggagaagttgaggatgaaactgtatggatgacattcaaaagacaaggagcacctgttcatagtaggaacttacctgaaaaggagaactgagtttttaacacatgttagcttgagtgcttgtaatatttgtaagacatcagagtggtagagtaattggaagagatgacctcaaccaaaagaaatatagcaagtaagaagacaagatgagccacagatgaaactgtggggaaatcaatatttaagaaacagttatctgtagagcagacacaataatctggagaaacagtaatctgtacgggagactgagaagaagcaatcagaacaatcggaataacaacagagagagagaccacaaaagccagtggagacatgagttcaaggaaggaggaagtggtaagaggtgccaaatattagaaaggttcaagaataactgggacttactctgttagctgaacagcatgaaatagagatgtttatttactaataacttaccatactctgggcacagagagggagaatgtgttttgagaaagggggagagaaagcaagacagtgaaagaaattcacatttacacatgagaaactgaatcagaaagggtaagtaaatttccccaatgtcacacaactagaaaagtagcaaagcagagattcaaactaaatttgtttggatataatccatttcttttgaggtgtggctatgactgcatttttattgttttttagttgatacataattgtacatatttatggggtatatgtgatattttgatacatacatataatgcgtaatggtcagctcaggatattttggatatccatcacctcaaacatttatcatttctttgtgttgtaaacattttaaatcttctagctattttgaaatatataataaaatattattaactattgttaccctactgtgctgtggaatactagaacttgtttcttctatataactgtactttggaatgcattaccaacctctcttcattccccccacaactgacccacacttcccagactctagtaaccatcattctactctctacttccgtgagattcactttttggctctcataaatgagtgagaacatgagatatgtgtctttctgtgcccagcttatttcacttaacataatagcctccagttccctccatgttgatgcaaatgacaggattgcattctttttatggctaaatagtactccgttgtgtatatataacagattttctttatttttaacttctataaattaaaaaatatcaaacatcaaggacaaaacaaaaacaaaacaaaaaagttcccttctaccccaatttgaaatgtaacaactatttttttgtatttactaaagatacaacccaaatccccagtcatcattcttcactcttcattcccagaagtaaccaccactcaaaaattgtattattctcactcttctgtatttttatggcatctggatttattaacataccagaagatattatacagtgcagctttgagtgttttgtattttaagttaaaatgttggcattactttttttctcttgacattatgttttacagatatagtcatattgctatctgtacacctggtgtattcatttaataactatatagcattccattaaataaacacaagtttttatgttttttttattctgtgacgatgtactatagggaagtcaatatacactacagattagcaagagagtacaatcaaagaggagagagtgatgtcaaatagacaaggaccttgaagttaatagtgctaaatttattagttatttggttagcatggacaatgtccctaaagatgtaataaaataacacgttctgtgcacagttaataaaccaggttgatttcagtcttaagctgtgaaagcaattggatattaaatgaaaacacaatactgtgattctaaagctttgagcagcagcctagggaatttcacctattctgtagaggtattaggggagcagaggttgtttctgggtagaggaatgattgacaagacaatgttcagcatagccaagaaatcttgaattatttttaatggataataaatatagaagataggtattatttcaatttggaagacagtcgcctcgtggtgaaaaagagaaaagggatgaaaaaagatgaggaaaaaaaatggataaatctagcctgaaggctaatttgcatatttatttatttgctgtcttttatttcttttattaaaatgttgacattgtttactcagtaaaacttatttgcttgcaagaagttacacttactagggtttatttaagaagattttattcttatgagaacatgtcttatttccaaggaatagagtaagtagatttatagccaaggaaacatttgatttggaacttgaggtctccgtgtttttggtctattaatatttaacagatcctcagtccaaatgcctagatgcttaaatatccataagttgtacttttagccataatgcttcactctttcctttttaatttgaaggttatacattattgctttaccaaaagacaatgaagcaaaatagcctaataacataaatttaataaactgtatcagagcagaaatggagagatagcttagcttccagttaattggaccacagtctcgtactagatcatcagaaactactgtttttcagcattttaaaacatgcatctttagtctcccctgaaattatcctctttgccagttcaaaatctttatgtccatatacggttatttttgaaatcgtaagtcatatgtctgttcatcccctttcctataaagctcattatctaaacattgtctcacacttcaaaggatcacctgttgatgtgaatggatttaccagtggaactcaggcaagagattccaggctgtgagcgttactgtttttgtaaagggaaggtaacttttatatatagtttgcctgcctttggacagtcttgtttctaccttctaaaatacgataattgaaagcacagcgttcctatggcttgctgatagattgtgagaaataacagcaaaatatatacagctgaggagattgcatcaatacatctctgcaccgaaattatggcagtgatttgcctagaattgggggctattagatcaaagattgtcctaaagtttaaagttacattcaaccaaacacatggacaatttttgttaatatcatattagaccagatttaccagttgttttctaaaatttaatatacattttttaaccattttaggttacagaaaaagcagaaagtatagagagttttcatataacatcctctttcacgagtttcctctagttttaacatcttgcattagcatggtacatttgtaacagttgaggagccgatactgacatgtgatcgttaactaaaatccatagcttacattagggttccctcttttttgggtgtaagttctgtggattttgacaaaggtataaatgatgtgtcaatcattacagtatcatgcagaatacttttactgccctaaaagtctccgtgttccgcctgttcatttctcctcccctgtattcctggcatcaaccagccactttgatgtcatatcaactcttataccctcataacgtgttttttattgtcatcattgttttgtttttgtttttctgttaatgacgtatggctgtgacaaggtaatgagaccagcggctgttgttggaggaccttttttcttaattcctggttacttatccttgaattatgtgacaagctgataaatccaataaccatggattttccattgtttcaacctgccaatacttctctcaagcttgtatatccaagaaaatataaaaaatagtagagcagaaaattacaagcttccatacttatcctactctccctgtgtccccatccccacttctggtggctttccaactcagttaagtcctgtacttagccagttggtgaccacacaatgtgacatgttttatatccaagtcagtctcagactaggtgagttttttatgtggcagattactgcttagtttatactcagacaaaaaggaaaaaattaaacatataaacacccttttttttttttcgagagtctcatgctgttgcccaggctagagtgcagtggcgtgatctcagctcactgcatcctctgcctcccgggttccagcgattctcctgcctcagcctcctgagtaactgggattacaagcacgtgccaccacacctggctaatttgtatatttttagtagagatggggtttcgccatattggccaggcttgtctcaaactcctgacctcaggtgatctgcccatctcgacctcccaaaatgctgggattacaggcgtaagccaccgtgcccagcctaaacccatgttttaaattaatgcaatgattgtattagcctttcaaacattaagactggcaaaattgttacaactatggagttttcattgattcatcctactcaccatcttttcctttaatatctgaacaaaccccaactctgttcactgttctccctgtgagtagactaatggaacaagagcaaacagtaacacaaacagacgctaacacaagttcatgcagaatcaataaaaatcagtacaacagaagataagtctatgtgtttttgatacatacgattaagcatgtgcctttttaacaatttatataaaacctaaaatatatgtatttctgatttttacctgtagtactgaagaagttacttaataacgttgaatataaaggccacttttacttaaccaccttccattcactattaactgctgtttccaaagtgtaagcaaatcagtctctgtgtacatagtcaagtgtatacaagcgtcaggcgtaacaaactcaagatgaacatgacagttcaaagatatttgggacaaaattgttgaagcatttttacccagggctctgtagctctgacaatgaaagaatatagttgctcttccagctgctattcagacagaaagcttgggcaagaagggtctgtatctatgttcttcataatacaattacaagtttgaacttcagataacatcagcagttggcatgtggaaaaccaaaaccctattttggtatttatcaagattgttaatggagtcaggtttcccttatttgtttctttaatggggtacagaacatcctgttggataacccgctgagtgacatgacgatgctctgaaggaatgcatgagagcttgtggtacctgccttgaaacatgggtttcactaatgctggtggctcacacttcccattgaacaagactagagataggaaggctatttgagggacacagctatggaaccataggtgccacatggtaagccaaatttttatttgttgtgttgttgtgaaaaaccttattaaaagagcttccaatgagagtacttgattaataacacagttcgtatctatagaaataatttgcttttcaagaaaatcatcatgtgctacagttgaattgacattaatgttatcattcattttgaatgatctgtgaagtattttaagagagatctggggaagtaaatcaataagtagtttaacataaatcaaggtgcagttaatttttttcaattagaaatatattacaaagattctgtcatttccaacaacgtgaaataacctggaggaaattgtgctgagtgaaataagccagacacagaaagatgcatattactgatctcccttatatatggaatctagaaaagtagaattcatagatacagaatagaagagtggtcaccacggtcttgggggtgggggacatggggaaatgttagagtgtgacaacttgcagttacaaggtgaatatgctctggagacctaacgtatagtacagcatagttactctactcaatagtattctcactgcaccccccaactcccccacacacacagtaactctttgaggtgtggatatgttaattagcttgattttggtaatcatttcacagtgtatacatataccaaaacatcactttgtataccttatatatgtacaatatttatcaatcatacttcaataaagctggaaaaatgcatgaatattatatatatgtatatgtatatacaaatgtataagagattatagcagattatagctctttgaaaaagaataacatttcagcccagttctgactaagaccaaacaaaaggtgatagcatgttttagttccttaaatgtggatttgaggagtcaagaaatctccaagtgtaggaaaacctccgtggcaaagagtgtagaatatgagaatcacaaaaatagcatgcacaaaatagcctgctgtgatgttgaaagtataagagctagtaattattattattattattatttttatttttattattatactttaagttttagggtacatgtgcacattgtgcaggttagttacatatgtatacatgtgccatgctggtgtgctgcacccactaacttgtcatctaccattaggtatatctcccaatgctatccctccccctccctccaccccacaacagtccccagagtgtgatgttccccttcctgtgtccatgtgatctcattgttcaattcccacctatgagtgagaatatgcggtgtttggttttttgttcttgtgatagtttactgagaatgatgacttccaatttcatccatgtccctacaaaggacatgaactcatcattttttatggctgcatagtattccatggtgtatatgtgccacattttcttaatccagtctatcattgttggacatttgggttggttccaagtctttgctatcgtgaataatgccgcaataaacatacgtgtgcatgtgtctttatagcagcatgatttatagttctttgggtatatacccagtaatgggatggctgggtcaaatggtatttccagttctagatccctgaggaatcgccacactgacttccacaatggttgaactagtttacagtcccaccaacagtgtaaaagtgttcctatttctccacatcctctccagcacctgttgtttcctgacttttgaatgattgccattctacgtggtgtgagatggtatctcattgtagttttgatttgcatttctctgatgaccagtgatggtgagcattttttcatgtgttttttggctgcataaatgtcttcttttgagaagtgtctgttcatgtccttcgcccactttttgatggggttgtttgtttttttcttgtaaatttgtttgagttcattgtagattctggatattagccctttgtcagatgagtaggttgtgaaaattttctcccattttgtaggttgcctgttcactctgatggtagtttcttttgctgtgcagaagctctttagtttaattagatcccatttatcaattttgtcttttgttgccattgcttttggtgttttagacgtgaagtccttgcccatgcctatgtcctgaatggtaatgcctaggttttcttctagggtttttatggttttaggtctaacgtttaagtctttaatccatcttgaactgatttttgtataaggtgtaaggaagggatccagtttcagctttctacatatggctagccagttttcccagcaccatttattaaatagggcatcctttccccattgcttgtttttctcaggtttgtcaaagatcagattgttgtagatatgcggcgttatttctgagggctctgttctgttccattgatctatatctctgttttgaaccagtaccatgctgttttggttactgtagccttgtggtatagtttgaagtcaggtagggtgatgcctccagctttgttcttttggcttagggttgacttggtgatgcaggctcttttttggttccatatgaactttaaagtagttttttccagttctgtgaagaaagtcattggtagcttgatggggatggcattgaatctgtaaattaccttgggcagtatggccattttcacgatattgattcttcctacccatgagcatggaatgttcttccatttgtttgtatcctcttttatttccttgagcagtggtttgtagttctccttgaagaggtccttcacatcccttgtaagttggattcctaggtattttattctctttgaagcaattgtgaatgggagttcactcatgatttggctctctgtttgtctgttgttggtgtataagagtgcttgtgatttttgtacattgattttgtatctggagactttgctgaagttgcttatcagcttaaggagatttttggctgagacaatggggttttctagatatacaatcatgttgtctgcaaacagggacaatttgacttcctcttttcctaattgaataccctttatttccttctcctgcctaattgccctggccagaacttccaacactatgttgaatagtagtggtgagagagggcatccctgtcttgtgccagttttcaaagggaatgcttccagtttttgcccattcagtatgatattggctgtgggtttgtcatagatagctcttattattttgaaatatgtcccatcaatacctaatttattgagagtttttagcatgaagggttgttgaattttgtcaaaggctttttctgcatctattgagataatcatgtggtttttgtctttggctctgtttatatgctggattacatttatttattgatttgcatatattgaaccagtcttgcatcccagggatgaagcccgcttgatcatggtggataagctttttgatgtgctgctggattcgttttgccagtattttattgaggatttttgcatcaatgttcatcaaggatattggtctaaaattctctttttttgttgtgtctctgcctggctttcatatcagaatgatgctggcctcataaaatgagttagggaggattccctctttttctattgattggaatagtttcagaaggaatggtaccagttcctccttgtacctctggtagaattgggctgtgaatccgtctggtcctggactctttttggttggtaagctattgattattgccacaatttcagatcctgttattggtctattcagagattcaacttcttcctggtttagtcttgggagagtgtatgtgtcgaggaatttattcatttcttctagattttctagtttatttgcatagaggtgtttgtagtattctctgatggtagtttgtatttctgtgggatcggtggtgatatcccctttatcattttttattgcgtctatttgattcttctctctttttttctttattagtcttgctagcagtctatcaattttgttgatcccttcaaaaaaccagctcctggattcattaatttttgaagggttttttgtgtctctatttccttcagttctgctctgattttagttatttcttgccttctgctagcttttgaatgtgtttgctcttgcttttctagttcttttaattgtgatgttagggtgtcaattttggatctttcctgctttctcttgtgggcatttagtgctataaatttccctctacacactgctttgaatgcgtcccagagattctggtatgttgtgtctttgttctcgttggtttcaaagaacatctttatttctgccttcatttcgttacgtacccagtagtcattcaggagcaggttgttcagtttccatgtagttgagcagttttgagtgagattcttaatcctgagttctagtttgattgcactgtggtctgagagatagtttgttataatttctgttcttttacatttgctgaggagagctttacttccaagtatgtggtcaattttggaataggtgtggtgtggtgctgaaaaaaatatatattccattgatttggggtggagagttctgtagatgtctattaggtccgcttggtgcagaactgagttcaattcctgcgtatccttgttgactttctgtctcgttgatctgtctaatgttgacagtgggtgttaaagtctcccattattaatgtgtgggagtctaagtctctttgtaggtcactcaggacttgctttatgaatcttggtgctcctgtattgggtgcatatatatttaggatagttagctcttcttgttgaattgatccctttacgattatgtaatggccttttttgtctcttttgatctttgttggtttaaagtctgttttatcagagactaggattacaacccctgcctttttttgttttccatttgcttggtagatcttcctccatccttttattttgagcctatgtgtgtctctgcacgtgagatgggtttcctgaatacagcacactgatgggtcttgactctttatccaatttgccagtctgtgtcttttaattggagcatttagtccattgacatttaaagttaatattgttatgtgtgaatttgatcctgtcattatgatgttagctggttattttgctcattagttgatgcagtttcttcctagtctcgatggtctttacattttggcatgattttgcagcggctggtaccagttgttcctttccatatttagcgcttccttcaggagctcttttagggcaggcctggtggtgacaaaatctctcagcatttgcttgtctgtaaagtattttatttctccttcacttatatgaagcttattttggctggatatgaaattctgggttgaaaattcttttctttaagaatgttgaatattggcccccactctcttctggcttgtagggtttctgccgagagatcctctgttagtctgatgggcttccctttgagggtaaccagacctttctctctggctgcccttaacattttttccttcatttcaactttggtgaatctgacagttatgtgtcttggagttgctcttctcgaggagtatctttgtggcattctctgtatttcctgaatctgaacgttggcctgccttgctagattggggaagttctcctggataatatcctgcagagtgttttccaacttggttccattctccccatcactttcaggtacaccaatcagacatagatttggtcttttcacatagtcccatatttcttggaggctttgctcatttctttttattcttttttctctaaacttcccttctcgcttcatttcattcatttcatcttccattgctgatactctttcttccagttgattgcatcggctcctgaggcttctgcattcttcacgtagttctcgagccttggttttcagctccatcagctcctttaagcacttctctgtattggttattctagttatacattcttctaaatttttttcaaagttttcaacttctttgcctttggtttgaatgtcctcctgtagctcagagtaatttgatcgtctgaagccttcttctcgcagctcgtcaaagttattctccatccagctttgttccattgctggtaaggaactgtgtttctttggaggaggagaggcactctgctttttagactttccagtttttctgttctgttttttccccatctttgtggttttatcgacttttggtctttgatgatggtgatgtacagatgggttttcggtgtggatgtcctttctgtttgttagttttccttctaacagacaggaccctcagctgcaggtctgttggaataccctgctgtgtgaggtgtcagtgtgcccctgctggggggtgcctcccagttaggctgctcgggggtcaggggtcagggacccacttgaggaagcagtctgcccgttctcagatctccagctgcgtgctgggagaaccactgctctcttcaaagctgtcagacagggacatttaagtctgcagaagttacttctgtctttttgtttgtctgtgccctgcccccagaggtggagcctacagaggcaggcaggcctccttgagctgtggtgggctccacccagttcgagcttcccggctgctttgtttacctaatcaagcctgggcaatggcgggcgtccctcccccagcctcattgccgccttgcagtttgatctcagactgctgtgctagcaatcagcgagactccgtgggcgtaggaccctcgagccaggtgcgggtataatctcgtggtgtgccgttttttgttttttttttgtttgtttgtttgtttgtttttgagacggagtctcgctctgtcgcccaggctggagtgcagtggcgggatctcggctcactgcaagctccgcctgccgggttcacgccattctcctgcctcagcctcccaagtagctgggactacaggcgcccgccactacgcccggctaattttttgtatttttagtagagacggggtttcaccgttttagccgggatggtctcgatctcctgacctcgtgatccgcccgcctcggcctcccaaagtgctgggattacaggcgtgagccaccgcgccgggccggtgcgccgttttttaagcccgtcggaaaagcgcagtattcgggtgggagtgacccgattttccaggtgctgcccctcacccctttctttgactaggaaagggaactccctgaccacttgtgcttcccaagtgaggcaatgcctcgccctgcttcggctcgcgcacggtgcgtgcacccactgacctgcgcccactgtctggcactccctagtgagatgaacccggtacctcagatggaaatgcagaaatcacccgtcttctgcgttgctcaggctgggagctgtagaccggagctgttcctatttggccatcttggctcctccccaagagctggtaattattacccaacgtttagaatataatgtaacagaacgtatttggaatacatttatcttttaatatttcaaaggagagataaatgcaaactaagattttatttatcattaaattcattgttctttagtttgaaaaacacatatactcatatttttgtcacgtgattttaaccagcataaagcaatagctgccacaccaaagtcaagtgaagctgtgaaaataattaatgaaacaattctgataaaagcatctttatccttcatacaggttataggcaggattgtggttgtgcctgtgtgtgtgtgtggtggggtcggtggggggataggaaagttagtttattcacatgattctcaacatagacataccttgcaaataattgtgcaattccctgctttgctttgcagacagaatgtctttgaatcaatgtcttttataaatacactatacaaaaaacataattataaacctttaaagtatttatgcatactttaatattcagaactagaagagaaatttctgtaaggagaaatgctttggagattaaaacgtaaaggagataaccaaattttactaaacctctatccatcatgaccacatttcctttcattctaaaataaaaatattttggaaatgttgaccccctgcccaccatttttgcctgagaagttttaaatgcgaagaacttgctcctcacttttgaagcacggtgctttctttaggaaccaatctgtatcacatgcattctattggtttgtattttattacatatcattctattacattttaaaatgcatttctgagcccatgtcattgatttcatgattcattaatgggttgcaagcagcagctggaataacactggcttaggtaatggcagtataaatcacatgttggtaaaatgaaagatgcctttctaccaacacgttataatggccactcgatgccaacatggcagtgtgttacttaaaccatatatcaatcaacacagaagcgacataaccaaaatgtttttaccatcatttatagaagattatgagtttcatgcagccaggattaattgcattgctattatagaacttaatataagttgtatcatatttgatggaaggatgctaactatcaagaggatataaattttaaaaacaatgatactgttttggataagtcctgactgtctgcattttatctagaacaatatatgttcatgattaacctagaaaataatgacaaaaatgcgcaatgagtagagacttgcccttggaattcctaaaattattaggaaggtacaatgttctccaagaaatattggtaagtgaaaaaaacaaggtttacaataatgtgtaacggatgctatctgtgtaacaaaatgtgaaaaaacatatatgcaattttttggcaagaagataccctgaaaacataaaccaaaaagccaaaaaaaaaaaaagaaacttgctgatgatacagaacttctctgactgtacatttttctcatagtcttaactctgataattacatacatgtttgacattctcaaaagtaagaacatagaagtacataatatatgcaggataaagcaaataacagtttatgtgaagattgttagaagccaaggttttcatggaagttattagtatgaagtcaaagtagtacattaaaatccagtaatgttaattggatttggaagtaacagtatgaaattttttctctaaaaatgtgtgcaggaatctcttgcttaagatcagtaatctattcccaaaaatagattttgagagcacatttctgttctaaatgggaacaattatagtgaatggaaggtaaaccaaaacatagctatttcctacaaaataattgatacctaataatgcctgtagaaaagcatagaaaagtgacaaactctcttgataaaatctaaaatgtatattgtttcctaatcagcaattattgatgttgctaacatacagttgctttgtatctagttacatggaccgtgtatatgctgtatgagaaattgtcactttgtggtatagcatagcaaataacacagcaatcaaaaagttaaaagtcaaaattaaaataaataaaagacccataatagactgtttttcaccttgctaaaggagaaatgactcttgaagaaactcaagaagggacaaagaaaggtcaaatcagtcattgctatttgcagaaggtgatgggtggatggaggacaagggggcaatcttcgacaaactgtcatatgaagaggaatgaagagaccttccccatgtctgtgtctagtagatgctgtagagacttgctggacaggaaagctttggtaaatcttcagaaatgatgttcaagctgaaggaagatgttcaagctgcattttggttgcaaaatgcagatttgcttgtttttctgttgaaaaattcctctatgtgatgctgtaagagttaccaggctattattaaaagaaagatgtattgtcacactgagtatgtctgcaaaactttcttagtaactggcctgtttgtttatactcaatgcacatgttaagatggctacataggattcttactatgttctatcaatttggaatgtaactcaacattcttccagcacataaagttgtttacaatatataatgagtgtgaaagatataaataaatacttctatttgatgtctacaccaacattagatgaaaaaatgaggtagtgagaagttgatatatatcctgtaaattagcatatttaaaaccaaaaatccttctactgggtaaatattaactaggaaaacattctacaggatataatgcatttttctagctctgccccctgaaaaggtctagtagtaatgtgatctgatggcactaaacacttctgatctcaaatgatagcctctaaaatgctgttttccaacaaagagaattagggctcctgaagaaatggctgatgccaggtgtggaggagaaaatgagcaagctgagcttgtgatatatgttcaccccagagagggctcatgtcacgtgggcaccaacagagaggggtctcaggtagcaacagtggggccattggaccatcaaaggagcaattagggtacttgactgaagcctgtaggttcataatttttactctaaaacaaggaaggaaggtgggaagaaaggggaaaggaggggaagggaaggaagaaaggagggagggagggaaggaaggaagtaaagagctagaacaacaatgaaacaaaatatctttgataactttttgggggagtacagagtggaaattttgcatttctggaggctttacaagatggggatctgtgcttcagaaataagtcagtaaagatacatttacatagatgtttcctccagtattgcttggaaaagccaaaatcaaagtgatgtagatagttacctaagagatgaataaaataaataatggtacatcttttgtatggaatattacatagccactaaaaataatggagcagaactctactcaatgacatataaaaatgtccatgatatattgtataatggaaaaaaattttaaagcaaaaggttttaccttatttatttcacaagctaaaaccctatatgattatacaaaccaatgtgtttgccttaaaaagataaaagtctggtgtcctctaagaccataccacaaacagtgatcacctctgggattggaattttatagcagttgtgggtagagagagtttgggagaaaacattcacattttatctcataattcttatatttttaaagcttttctatgagcattattttgatacatatgtgagcagagatggtcccttctaggtaccagttacaccattgctaaacctcgtctgtttcttccaaaggtgtcaggcagcgaacaagacctgccccaccaattacatgtggaataatcacatctgcagatgcctggctcaggaagattttatgttttcctcggatgctggagatggtaagcagaatgatgctttaaagactaaacgccaggggtctatattgtgattaacatactctaatattaaaaccacacatataatattcatcattcttctaaataagtgactaaaaaatagtacattttctacttcacgttggtattattttgaactcctttataaaggaacatactcatgtttgtacccaatcctttgatggaaaacatacaaaaggaagatgcttttaaaagcttttgtttcatgccacacccagaaccaagtaaggtatagtaaagattctctgactatttgtctagactcaacagatggattccatgacatctgtggaccaaacaaggagctggatgaagagacctgtcagtgtgtctgcagagcggggcttcggcctgccagctgtggaccccacaaagaactagacagaaactcatgccagtgtgtctgtaaaaacaaactcttccccagccaatgtggggccaaccgagaatttgatgaaaacacatgccagtgtgtatgtaaaagaacctgccccagaaatcaacccctaaatcctggaaaatgtgcctgtgaatgtacagaaagtccacagaaatgcttgttaaaaggaaagaagttccaccaccaaacatgcaggtaagagatcctcatgaagaatattaatttatcttactagaaatatgctctaaaccaaaagcagttttcttaaccaaagtaacaattgcttgttagaatgaggccaatacattctgaaagacaaaaatcttatatttttttaaccaatgctaaacttgcatgagactggatttgcttccaaaaaagcaagacaggagccttgaggatcaaaattagatccaagctcagaatatactctaaattagtggttcctgtgggatgttttcaaaatacctaaaggcaatccacttcacccccaccaaaaagtaggatgccttcagacataatttaggacaactgttctaaatgcagacaatttttatgcaaaacttacaaacaaaggacaggagagtaccactggtatagaattatatctggaaatgaaaatacatagctaagtatttgatagaattagagaaataaatgaatatgttgttaaaggtacccaagactcatgtcttaaacttggttttgactcttctgcatcaagaaaaaaaaaatgaagttattcgactcaagcacattcagtgttaatcccgaaacctcttcctctttaatctcagagaataaattgatcctactatttaagccagacctgtccgtttgacattttctccacattccttcaacattgcttcatgccattccttctttcttctgtaacttgaacatcttcaactctactttttttccccttagtttataaaagttcccaaatttcttctattttattagcctcttactgtgaagttgagcaaactttagcaacccaggtctgttctcttcaaagctgctcaaaaacgaggcatttgttttcacctctttcacctaccatgtattcaaccaactaaaacctggtttatggcctacagtgctatgttaaacctctgtttaacgtttcattggcctcatagttgccaaatccaacagagaattttgtccttaggtaacctgtcctttccatggcctttttctttaagctcacctcttctatgacatgacattgtactttcctagttgtctacttaattttcagaccatttgtttttaatcactttcactggattctctttttacatccattctttacatatgggtagataatgttctttttaacagaaaaaagcttgtatttcatttatttactatcttcactaatgttcattattatttttccacagtatataacgagttcatctttttattctcaagagttttgtgtccttattttaatgtatatttttggtggttttcctaaactaatattttagctactggataaaaaggctttagtggatctggctatctcattgattatatttttcttcccttatactgcaaagtacatcataggtataattttattttgagaaagaactatattccaattttacctatatattcctactgtaataaccaagaggacatttcaaaaatgtatatgctactattttcagaaggatatagatactaaatctttttaagccttattaaactatgttttatattgaattcttattgagtgaatttagtatacattgaaaaatctgaaattcttatgtctgcatacctacttttctacagaattatatgaacacagacaatatttctatcattgcatttctcctaatactatacattctttcaaaaagactctgtttactgcaactcatcctagattcatttttctaagtgtataattccaagctttgtgatataaattggagcaaaagagaaaatatcatattttgaaaatatatattctcctcattctctcttaatatctattacaaagtgcagtaggcagagtatatattctttggttcattgccttaattaacagcttttatggatcattaagtatcatatccctttttagtagaggaataccagtagtcataactatgaatttgcatttgcaaagtttaagaaaaattaactagacatgctttcttttctagagccaaataaatgaaatgtcaaaaccaaattgtgtagggttttttatagcacacttttgatttccacctcaggtcatcttgcacttttccctttacacctattcccacacattaggcatgctcatactccaaaatgtttttaaaagatagctccaattctcaccaggcgtggtggctcacacctgtaatcctagcactttggaaggccaaggcgggcagatcacttgaggccaggagttcaagaccagcccagccaacatggcaaaaccctggctctatgaaaaatacagaaacttagccaggcgtggccacacatacctgtaatcccagctactcgggaggctgagacacaagaatggcttgagcccaggaggcggaggttgcagtaagctgagattgccccactgcgctccagcctgggcgacagaacaagactctgtctcaaaaaatgaagcctcaattcactggagcaacagggcaggagacacactgaccaattgataatttgtcctctcaccgctactggaaactggaagtctaggatgggaggaaggggaccctcgctgctgagtattgtccttctcacctccctgccccagaatgcctctgtttcacctggagccaaggtggaaaggaagagttagtcaccgtcatgcagccagctgccaagtagagacacaagagtgagggtggggctgctcactgaggaccacagttctgccaacatggctgggtttaattgcctggaagtctgggtcccatacaagtcccagactcatgtgaattctgccatgcttatgtgatcacagtaagtcagcagaccttcagtgttcactttcagaatttctgttttatgtttctttcacccatgaagcaaagagcacttcaaaggaactaatgcttacaatacctcatccttccatttgttatatcagcaagcaagacttttattttaaggcttttccattcctcttaaatgttgtaattctaagcagaaacaaacttttttaaacctatgaacaatttcgtcataaaattagtaattttattccagtctgaaatttaaaaacacagaaataccttggtagcatgatgaatccattgccttgatctttaacgtaagtgtgttcttgtttgttctcctagctgttacagacggccatgtacgaaccgccagaaggcttgtgagccaggattttcatatagtgaagaagtgtgtcgttgtgtcccttcatattggaaaagaccacaaatgagctaagattgtactgttttccagttcatcgattttctattatggaaaactgtgttgccacagtagaactgtctgtgaacagagagacccttgtgggtccatgctaacaaagacaaaagtctgtctttcctgaaccatgtggataactttacagaaatggactggagctcatctgcaaaaggcctcttgtaaagactggttttctgccaatgaccaaacagccaagattttcctcttgtgatttctttaaaagaatgactatataatttatttccactaaaaatattgtttctgcattcatttttatagcaacaacaattggtaaaactcactgtgatcaatatttttatatcatgcaaaatatgtttaaaataaaatgaaaattgtattataagctg

SEQ ID NO: 83 - DNA, 38823 bp, Homo sapiens
aagacacatgcttctgcaagcttccatgaaggttgtgcaaaaaagtttcaatccagagttgggttccagctttctgtagctgtaagcattggtggccacaccacctccttacaaagcaactagaacctgcggcatacattggagagatttttttaattttctggacatgaagtaaatttagagtgctttctaatttcaggtagaagacatgtccaccttctgattatttttggagaacattttgatttttttcatctctctctccccacccctaagattgtgcaaaaaaagcgtaccttgcctaattgaaataatttcattggattttgatcagaactgattatttggttttctgtgtgaagttttgaggtttcaaactttccttctggagaatgccttttgaaacaattttctctagctgcctgatgtcaactgcttagtaatcagtggatattgaaatattcaaaatgtacagagagtgggtagtggtgaatgttttcatgatgttgtacgtccagctggtgcagggctccagtaatgaacatggaccagtgaaggtaggtgagctcaatttttaatgtgatgaagttctttttattggctcatacagaggactttctttgccctcactatttttgaaacaatataaaaatgcagaaccatcctagtagtggactggacaggatatatcctgcatttcttggtgactgttctgtttcttagtcttattaaacttctggccatgagtatttgaaaatgctggggtgggggttggttgttttttgaagttatggtagaacatgagcagtctggaatctttttggatggagaagtttctcctcggttgcatatgcagatggcacagtggttttttaatgaaacattgatttgtttttatgactgataactttgtgggccatttattttcaggtctttgtgagcagcagaggttagtttattcgtttggtaaattgaaaattgcagtgctttctatgaacattttctatctgcttttgcaaattaccaattgctgccatccagaaaaatgttttctcagagagtgtttggttttttcgcttcttgaaaggtgtaaaattcaacactaatcaaatctttggttctgtgagcaagcatcaaatagagcttaacgaacagagagtaatgcaaaaaattaaccagaatgttgctgactgctggaacaatacttagcccaattttatgcatttcatggattatatatattttaagcttctattttgaaaatgattcggatgtaattgttttgactgaagtggtgctaaatcattattgatttaggaacttctggccttgaaaagacaattaaatgtgagtttgagtttttgtagctgttgtttaggacgtgcattttcaacaggggtgatatcgcccccagcaggggaaaattggttcgtggagggatgaaaaagttttacccttttgatacatcacgcacagacgtacatacagtacatatggtatgtagtttaaaatacgttatacattcaaattgcatagggggaaagtgtcttcaaaggctcctggctggtgttggtggcctggcgagggtgggggctgatatttaaaaatgttgaacactgagctggaggtgagtgggaagtcaccttgtctggcagccagcacttttctaacttctcaaattccaaatttacatgggagaaatcacagtgtttggctccattttactgccaccagccttgatattggatctcaaggccagattgtaggtaaatgggaatctgactgtaagcataggtaacaggagaaaacggtctgacttgtttgaagcaagtaagacttttccgactgtccagctttttcgtaagttcatgaaacagaaatcctttagatgtgctgggctcctcgagttttaaaatatttccattttccttgtaaaacatcactttatctgatggtataataaaggagactgaattgttggacataagtcatattctttaggttgctcagctctttcaaagagcacaagcaccaagaatgtctcaggtgtcctgggcactgtgaagttttatttatttatttatttatttatttgagacggagtctcactctgtcacccaggctggagtgtagtgatgcaatctcagctcgctgcaacctctgcctcccgggttcaagtgattcccctgcctcagcctctcgagtagctggaattataggcacgtgccaccatgccgggctaattttttgtatttttagtagagacagggtttcactgtgttagccaggatggtctcgatctcctgacctgatgatctgcccgccttggcctcccatagtgctgggattacaggcgtgagccaccgcgcccggctggcactgtgaagttttaaatgctttgaatgtactgttaatatataaatttgttgaatggagtaacgaaggaaagcagctgaatttgcatgtgacagaaaacaagttgttacacgtggaggatgcagcattatatacttactaatacgattagcaattttttttcagaatatatcagaatttcctttaaaaagtgaagctacatatactgaacttatatccaccctacccctcgctcaattaaattatttctgatatgaaggaaaggattgcctatagctaaacagaagttttggcatagatatgactgagtggtaagggataatgagatatataatattggttatagttttcttttttccccaacttttaagaaaagaaaatctaagaggaaataatgtttctaaatgttaaagttcttcttgttaaaattaaaatgtagtgtgaaaacatattcatggtggtaatggtttagggtggtggtatttgaattttttgtttttttttttttactttttgaaataaaatgttttatttattataagaaattcatggtcttcctcggtacttggtccatatgtatttctttctcctcaccctcccctcttctaaccacctcttttccagaatggatggtgatgccaattttgctcctaggttgtcctccagccacccccagcccagttttcactttctagctttgaagattgtccagttttccagcttagactagcattgcctctacgatagttctaggtatctgtgaagatttttttttttcctgtagcaatcatgaaatagctactagtgctctggacgattgtgcttaatgccatttgggtgtaaggcctcctaatttcattagtcttaccacttgtgtttgcaaggatagctgtttggagtcagcagtgcatggaacatgtgaactgagacaaatctgtttgaaaatctcaacttaagatttcaaatccactgtgtatactatttagctgttaagtttctcagtctaagaagaacacgttttcctctagaaataagcttaacccagtacctatgcatcgttcattaatataatcagattacggcctagatgtggaatttatttctgtttctattttctccagctttttaatacagctcagacagtcatatacagttgtacacgatgtgcactgcacaactctagggtgctccatgcatatagacatatctgtatgtgacagccctaagtacaatgtggtagacactctggacatttggtaaataagtatctacatcctcactcttctctcattcacattggccttctggccagcactatttctggtttatttaataaacaattcttgtcccccagaaattctgtgagtcttctgaagatgctggggaaagccagccttcataaatcttttcaatgtcactaatgaagacatgtcactattgcaacaaaggaataccaggccatagtaggctttcacaacttttttctgacagaatttgtttctttctgctttatcttccctgtgtactgtctttttttatccaccctctttcttaattacactggtagaagaatattggtgggtgatggagtcattcacattctgtgtaagactagaatcagtccaagatccacaggaatgtgggatacttctttcatgagaagccacatggctcacaagacttctttacatttgtgttacttgccttctcctgaaattgtctctacagtgaatcaaataacaaggactgaggtgtattttccatatttaattccaggaagcagtcccactccttctccctgcccgatttccagttccaaagtcatgtacagggaagtccattgactttgatgttggtcaaatggcccagcaagcttttgtccacttttctgtcagacacagtccttggcacaaaagacatctgaaatacttcccattaatttcttctttatttatgaccttgtagttaagtgtgttgaattatatgcttctatacacatctgttttaatccagttactcacttataactggtgactgaaacttttatatcactatagcgtattattggtacccaggatacaatagaatcctcaatatcttacatcttcaatatagtacttccttgtatgacttatttcttaacataaaaatcctgttttagacctgtggataaacctttactataaatcccagagacaatttctggaatgagaatatagtatttgtccacacacatgattccatgtagaacttgaggtaataagatctgggactcccagatacatttattattaccacaattggatagaggtgctacagaaataggcacacaaatgacagtaaaattgtttctgagaacatttctaggctcaacttttttctacaacttaggatgaacagagagagtggaaactgtatataattgggaatgtgactgagatgagacaaagatgacatggaagcatttcttcttcccttgcttttctggtggtaagttcactcttctgtcttccttgccactagttcttgcagtccctaccaagacactagggcattatacagcaaacacaccctgaggccccctgctactgcatcatgaaagccttagctggttgtgatgtcctagttcataaagaatctgcctagtctctcattagagctttccaatatttgacaattcattcatttatttttttcaacaggtatttattgggcaccaatatatctaggcattgatctaggggctgggaatgaagcaggaaataagtctaggggctgggaatgcagcaggaaataagacaatgtttcaattctcttggaatttgcattccaagtgtgatgggtagaggcagacaatatgcaaatgtgtaacatgtcaggtgtgataaatgctatgaagaaaatcaagtagggggagcggatacagtactgaataaatcagaggagacctttctgattcagttatgtctctacagagtcctgaaggtaataagagagacagaggcaaccatcagtgcagtggccatggtgggcgcagcaagttggcttcgatgtctgggtattagccagggagccggtgcagctggaggtggggtgagtggaggccagaagtgcagttgttgaggttggagaagtagccagagaagatcatgtaaggtgtgactgtgctcccataaaactttatggacactaaaaattgaattttatgtaattttcctgcatcatgaaattaaaaaaaaaattgtttcaaccattggaaaatgtaaaaaattgttcttagctaacaggccatacaaaaacaggctgcaggttagatttggcccatgggtcatagtttggcaattgtgttatatataaattattacactgttttatcttcatcatggtacacatccatacctgacatgttttatttgcctgtgtatacatttattgctttgtcaccgtctactagaatacaagttttttgagaaaaggagctcttaattgtcttgtttactgcagcatcccaatcaccagtgaaaagcctgtatgtaatagagtagatactaaaaacagtatttgttgactgattgatggactagacctcaggatttttagatacccaggatcaggatatgaactactgcattaaatcatctccaacatctactctcatgatggcttgtctgacttcatgatttaaaaaaaattctaaagcatttttaaggcagtatattcaccctgtgctattttcctgtgggcataggatagggtttgtgtggatgtatcaaagacttctccactgtccttccaggcacaagccatcctataaggcgttcccttttaggagccagaggtatagaaggaagtcatctgagcccattattccagcctgttggtaacagaaagagagatgagcaaagtagcatttggctgcacaggggtctggacaaaacttcaacatcttgatgttttccttcatccctgagagccttagaaatgctacctatgctttcattttatgttaggttgtttgtaaaatcatggtaaattatggcaaaatactctggtcagatactttatcaggttaggccaggatatgctgtgaaaacaaacacccccgaaatcttggtggttcataaacaacagagacttatttattgcttataccacatgaccagcctggttcatctggggtcaaatccacatggggatgaagctggctgagtatccgatcttgaatgttaggaatcactatgacagagggagggagagcctgagagcgcctcaccctggcacttaaattctctggcccagaagtgacacatattacttctagttgcagccccttgacccactgccccatctagccacaaagggccaggaagtgcaatcccaccatgcgctcagaaggcagagagatggaaatatttgacaaaccgtattaatgactgtgacacatggtgagttcttcacattggtgacttctaagtgcttctgaacacacctttgactgtagaatgtcaaaaacattctcaattttacagcagtgctggaaaatgaattgtattgagacaacttgggaggagtagaaggagatggaataaaaaaaattcactgatttctgtcatgtgtcatgcctcctttaatgcacggaagaacgtatactttgcttaggaaatcacattaccacattcagaacaactttagtgaagatgggaaacaaccatggctggtcaatggggtaacgtgtgctgaaggaagacaggtttatttctcaggaggcatcttctccctgggaaaaggaaagacacatattcatctcagtaaatatttgtggaatgtctaccatgtgccaggcatatgagtggaaatgatgtttttataaaataaagatgtcttaagtatttgcatgtcttactaacagtcagggagttcaacttggccagtgggaaggataattttatgcctgaaactttagtaatgtaaatttttatgctgattctctttttgtcattcactgagtattcctaagtaactataacactcacatattggagataagtattggtttcctgaaatctaggtttggctaacattgcttctggaaagagaaaataacatgtgttgaatgtccctatggcaaattcttgctgttacttactgttccattatggagagtgttagaaagagtgtaattttgattgaatgaatatgctaaaaaaaacaccctaaataagaaactcacaaaaagaacagagtggaatgaaaaagtgaaaacaactttgcaatggtgtgcttcgtttataagtacattgtcacagcaagactagggatgattgggcatcttagagagtgcagaggatgttgataaggaagaggaagaggagataagtggattttgatatgggacactagatccttagggaagaaatgtgaaagagggtattctgggctgactgccgctggcatagcaaggctgctttgtagaagggacaataaagttttgcataaggatcctttttcccatccaatggattatgctatactttagctggaatagggctgtagcagttagctattgccacaataatgctgtgtaacaaagcagtccaaatttcagtggcttaaaacatcactaccttattctcacttatgtctccaagtcagctgggagtcagaggattaaggctcaaggcttaggtttggtgcaggtcagccccaggtgtctctcatcctcctttgatcagtgggctagcaggagcatgtgcttgcaatgatggtggaaatagaaaaacgtgcaatcatatgtgagtttcaagcctctccttgcatcatgtcttgtaatgtcctattggtcagtagggctgggaaatatatccctccctcagagagtcaggagtggaaatgaaaatgtttttaacaatagcctaatcaccataaaggctttgggtggcacactgggcccttgatcttggagatcagtgatagactgtaacagacctcagaaaccccttggggttattcagagcatacttctagagggtctggggttgtcttgccattcaagcccatcccacacccatctgcccccacatatcctaagcacagttatgtcaagtgagaacagaggcatttgagtggagcacagatttcaaacacataaaggcagggcatggccatctcccgcagtgctagatgatctggctgggagaaaaccacaagcagtcttcatcaaattggaggatgtggaggtcccaggcatttagtcccctagtatgtccttaaaaaacccagacagccatgcacacacactcacacaaatgcacacgcacacacacatacattcacacacacactcttttcctgcatttgtagttcctttcctcagtctaagtttaattaaacaacttggatttcatatatattcatttaaatatagaattgcataaagaaaagagccaccagaaccaccaatggtagcatgaggcctctgaaatgaaagatgagcccaccccaaccttaaatggccaggtttctggatttcagagaagcaagatcagacccttggcaggttccatctgagcagccacagcagccatagctacagcaataattattagcaagtgtgcgttctccctgccctagttagtacaccctataccatcaggtgtcatctgttctagttaaagtcagaccgtaataacaaaacatcaaaatgtaaaatgtgggttgtttttttctttacacacttctaaagacatttaaagcctgagcagataccttaaaattcatcttctatctgaaaatacctcctagaaccattttaaaaaggagatggaggcaaggtggagagaaaaagtttgtctttggttgacactgggaaagttgtcttttaaaaaattttttaatgtttatttactatggagttgccgtgtcttgctcttttcaagctcacctgtccggcttctaaggaatatcaggggccctaaaacacagacttctaaaccccaacacataggacacacctaagtgtggaaagaaaggaaagaggcaggaaagaaaggaaagaggaaggaaagaaaggaatgcaacatttattgtgtgcctaccatatacctgaccctttcctacatatgaccacatatgatctcttcatgagctttatgaggtgacctattattaacaatgctgctttataaatgaggaaaccaagccttaaggaagtcaaataccatatcctcagtcaaatagctaaaaaaaaaaaaagaaaagaaaaagaaaaggtagtgcctggattcaaagacagcttatttttttaacttatagagtaaaatggattttttcccttttggtgtgtagttctatgaattctaacacatgtatagatttatataaccacaaccataattaggatacggaactattccatcaccccccaaaaattcacttacgttatccttttacagtcagaccttcctcccagcctcccaacctctggcaatcactgatctgttctccttcactgtcgttttgtatttttggttcgctgtcattttggttttttgggaatgtcatataaatggaatcatacagtatgtagcagtttgagattggcttctttcactcatactgcctttgagattctaccagtgtcccagtagttcattcctttttattgctgagtagtattacatcgattgctgaaccgttcacccattgaatgacacataagttgtttctagttttttggctattgtgaataaagctactacaaacattcatgtacatgtatttatgtgaacataaggcttcatttatcaagggtaaaatccccagaagtaggactgttgggtcatatggtgagcatatgtttataagaaactgcaaacacattttccagagtgttataccattcaaagccagttttgaacaattcaaatctatgctttttctttccagtaagctgtttctccagacgacagagtggtttactatattaggcaaagcttcatcttggggaatgttatttccaactgagagctatgggaggcaaagtcacaaaccttcagctcagactcaccaatctaacttgatctgggaagatacctcgacaggtgggggagggagaacatctgctgaggaaggccgggagtggagtgagacattgctacttggaccccaaaaccaggaaaaatttggtggttttggttgagcttgaaccatcaggttaaacaggaaatgcaaaatgctcttccagtgaaacagaagaagctgctaagaggtagagggaacatggaactatttgtattgcaaccgaatccacctccccaaacccactgcaaagggaaattgctgactgcaatgtccctgaactccagggtgagtaagaagagaaccacgccccccagggaacacttgtaaatttttaagcaaatctagggaaagttgtgtaaaatgtgtcccttccataactcaccctaaagcttctgggtattctaaatatacaaattctattcatcacaccgttttatcaccaagcttcctgaaggcatattgccaacacaatttgacaaagaaaatagcaccaacagctttttaaagccttggaaggatagtctcagacccatggctctctagaggtccagggatgaatctagcaaagctggcctccttttccatatatatagaacaagaggattgttaatagcatgggattggaatggctcaagaaaagctttttgaagctctttgagaaaagtagccagggtccccccttaaaccttctttgctgatggccttacagctcaaaaccagcattggaaccggctaggtactcccaaaccaaagcctcttccacttggcatgtatatttatattctcatatcttctttcaaatacctttcagtgttgccttttgaaaagattataatttgtacttttttgttgaattcagtaggttaaagcagtacctattatctttaattttattttgaaaaattggttggtttggcttttggggaatttgagaggcaatttagtctgtcatttaggatggcatcatataaggcagccaacttcatcatgctatttagcctgaaaagcgatattgttgatcttcaaccttgaaaaagtcgtacaggttgggagctgacctgcaaatggtcaggtatcttgagataggaaaaggatttacaaatccaggtcagcaagatactcatacaaatattttgaacccaaggtatacatcaaatagatttaaagactaagactatttctgagcatgcatcgactgtttgaagactagtggacttgtatgaagttcaggagttaacctgggtcttgtaacttaaaaacagcatttctcatgccctaaattagtagtagagagacaatatagagagttcctatatagccctcacctatcttcctctaaggctaacacctgggaagtttttttttaaaaaatcctgatggcaaagctgcagcccagacccaaaaaatgagaatctgtgagatttaagattcgagcatcagtatttctttgaagcttattcccaggtagattcaagaagaagccaagattttgaatgcctgctttattatttttttttttgtgagagctttaatggcacaaaatgtttatagctacaagttatacatgtattgtaaattgtatataacgatacaaagtgctaactaaatagatggagaacgcataaccactttggctcagttaatccaataatttccacaatgggttcatgaaaaacctcatctgactggctaagtcttcaattctcatttttttagaatagtaaatatttttactgcaatcacaggaacttgttgcgctttccaatgtgcaagtttctgcagttttgctcttgattctatttacaaatatcttaagccagttttcatcaaacatatgaaaaatgaagcctgcctttttgtccccaaattgtaaataggtgtaaatctttttaagcatcaatctcacaatttcaacagttaattgttgaattctcctttccaatacacgatgttttcgttcaacacaaatctgggtagtagtaaaatgttcatcccgtgtgttagggctacagatacatactacgtgctctcataataaattttactgttatgatgtattcattttttaagtaattttccataatttcactgatgctttaagaaaaagagcaacactatgtttctttttaacgttgaaagaaatcataaatatacccaggttcaatggcgctactgatagaactgctgctgaatttggaatgagcacaatgcactagctgtaagaagtcagttttgggtaatgaataattttacttttccctcctgtaataccaatttcatactgtagcagtttatctagtcagttctcctaactttctgtcctttccaattttattcaggcttttcaaaaatcagtgagccatcagatttactttcttcccaaagaaattcaaatatgaatgcttgaaataaataggttatagaaggcaaatcaagtgttatcaggtttaagattaagacagaaacatggtctaataaaaagatgtccaaaattatctagacatcaaatgctagaaagaaaaaagaaaattacttgcaaaactatttaggatatatcatctttcttaaagattgccagctatattcttgaaaaaaagataaaaattttcttgtttaacctgcatgttattttccactataacattaattttacaaatgttgatgtgagagagaagagttagatagtttctgcaaactggcaaacctggctgtgatagtgtttttattcaagttaacctggtgcactttatagattgctagctttaaaattaacagtgtgaacccctgctttaaacccttctcaaagtgcagtcagccaatcaacagtattgccatcacctgggaacttgttagaccccactttgtcaaactcatttcctggtatgacaatgaatctggctacagcaacagggtggtggacctcatggtccacatggcctccaaggagtaacaccccaggaccatcagccccagtgagagcacgagagaaagagagaggccctcagctgcttgggaatccctgccacgctcagtccccaccacactgaggatctcctctcctcacaatttccatgcagaccccctgaagagggaagggcctagggagccccactttgtcatgtaccaccaataaagttccctgtactcagccaaaaaaaaaagaaagaaagaaaaaagaaaaagaaatgcagcatcctgtcttgccccaaacccactgcgtcagaatctgcattttaacaagatccccaggtatgcacattaagttttgagaggcagtactacatataaaatatgcaacagaccacacaaacctgggcccaattgctatttgtcagatacatgtatgtatttattacttataaattccttcatcagatatgtattacgtgcttattactttaaaaagatgaatctgacacatatcctaccctcaaagagatctcagtctaggaagggaaatacaatgtgttcataaataatatagtctaagttagggacttcataaaatgcttgatggaagaagtggcatttattttggacctggaatgagaactgaaagaagatattcaaaagacaagtgatgtagtgatgtagttttgaatacacgaataatctcagggttactttttctatagcttttggtgaatcaagttgtttattcatacatttaataaatatttattcagctcttactattgctataagacagataccattactgctcaggtggtttttacaacctagtggggaagacaagcagataacaagaaatgacacaattcattagtgttactggtagcgttgtgaaggacaaggatggggtgctagaaatccatgtgacggaccagacctaggcaggggtgggagttatggaggaggtttccctgagtaggtaacatctaagctgagaaagatttagttagacaaagagtgaatggcattccaggcaaaggaaacagcatggactaaggtcaaaacaagaagaaatgaacgaaagagcaagttgataaaatggatgtccaataatattccattgttcaactatgcaacatttttcattgcctcccaaattggatcaaagtagcctggtcttcatgcctccagtccttcctctttttaaaaattttatacaactatattaatatagaatttacatactataaaatttcattcaagtatattaggaaatttactgagttgtatagctatcatccatataaggtccgttatgtccctttgcaatgaaccctccattctcactcccagcctcaggcagccaataatctattttctgtctctaggggctggaaacttaggattggaattagttggttgtataataaatttagcttattagagaactgctgaactcttttccaaagcaacaatacaattttacagtttcatcagccttgtgtgagggttcctgttgctccatatccattacaacacttggtattgtcagtccttttgtttatagccattctactgggtgtgaagtggtatctcatttcaccagcccctcttcctaacttatttgccagattccccacttctaaacttgctctatgcccaaccaaagtgaaccccttgctgttttttttttcccctgaggctcgttgatatccccaaattatgcctttcttcattctttgaatgtgttacttgactggatatgtatttttggtgaaggagaggggctggaaattgagagatgaaattggtaggagtacagaaggccgttgacttcctcacaacgtgggacacttccaagtttctcctacaaaccccaccactatacctttccaaatatcttgcctgccatcttggtcacccgtgacctaaattaatacttaggaagctatggagatgctcatgcttcctcaggggagaatgctgtgtgaacttagaaattagcaaaaggggaaatgactacccttgaaattgtaccacagaaaggagcatacattcaaatgatggtgaagtcttattaaaaagactttaagcctcccaatttagaagctggcttgtggtagccaagaaattagagaatgatttgttatttaagagtgaaattgctagtagtcttgaattaattaccataaaaaagctgccgctgtaataaaaagcagagatctggtaaccctgcttcattcactttcttcctcttgatgaaaaccttttaattattttgattttgattagcacttccatcagaaaataggaagaaattaggagcaatttacttggcaaaggtttagtaattaaaaccactgaaatcaatggtttaagtatgtatttgggataaacacatttttaattgttatttttgtcttacccaagtggataacataaagttcattatacaaaaatcaaccagtgcagaaagccgattgggaacaaacaaccattcttgaaccctttgaaaatgtatgcccttgatgaattacttgtcaggtttctacttaagtttaattgttagtacttccacttaaaatagcaaaatgactgtctgcaatttctgttatttcaaactaggttttaaattctggggttgaaagtaagcttaaataactctgagtacttgagtaaacactgcattttttatgatgaggcaagttgtatgagccatttaattactttaattcaatccagagatttgatattttctcctgagttctcacagttggatagtttaaaaatatttctaagattgaattgaatcctgtaagaactataataaaaccatacatctgcctgttttctttctttctctttctctcctttcttttctttctttctttctctttctctcctttctttctttctctttctctcctttctttctttccttcttttctttctttctttcttttctttctttctttctttctttcctttctttcttctttctttctttcttctttcctttctttctttctttctttctttctttctttctttctttctttttctttttctttctttctttctttctttctttttcaagatcgtgctccattgcccaggctggagtgcaagtggcgagatcatggctcactgcaaccttgacctccccaggctcaggtgattctcccacctcagtctcctgagtagctgggagtacaggcatgcaccagcatgtctggctaatttttgtatttttagtagagacagggtctcaccatgtttccagtctgatcttgaactcttgggctcaggcaatcctcccacctcggcttcccaaagtgctgggattacaagtgtaagccaccatgcctggccttgtatttttggataatattgagtgaaatttgcctcaatacataaaaatcctttcaatatgcttcaactctaaaatctttaaaaagctgcttggtttcattattttcacgtggaagcagcattgtcacaaagttttattttgaagactgaattgtatatggagtactgtccaactagaagagaatgaataatcaggaaaagagagactattgacaaataagacttaatggagaagcattgaatttcaaagctgccagagacattagcaattgttcagtttcatctccagatttcttagatgaagaagctgtggcaagccaatttcacaaacccgatctatgatcctcatgctccccactcctctcactcccacaattttgccttgattcaaactttatcgaaaagtgagaaatcacaggtatgagctcactgagcttcccaggcagtcttgccatctacaaacccatgtcattctgtattttcctcttgtttctgacagtgatcctctcatctagtcacactacatccacttatctctggcacttatgtcaaaacaacccctctaggtcctgccttagctctcctgcatatgctttttctttcttcctgtctgttgcctctttcccccagcttataattctcccgcttttattaaaaacatgcacccacagacacacactcacatctggattcccaagtgcgataaccttgtagattcatattttcagatcgttcttagtccacagaatataaaattgattgaatgatggcaaacatctgcagatgacaatcatttacagaaatggcactaaagccatgaagctgaagctgcaggacttatggatctgggctagaagacaggggccatcaaaaatttagcttcagttggaaatcggctcttttagtgcactacatcagatccatgaaagaggaaggaagagttactgctcattgctgcctggagctgtgacttctatgaaattacttaacggggcaaaggaggaagcagatacttccttgcaactaggacgtgagctgagctgatccctgaatcataaatactcaacaagattcggattcaggacccagggtattatggggtacaaccataaaacttctaaatgttggagaaagaataatgagaaagaaaaatgaatctctgaatgaaaatggaactactaaccaaaattccaaatcacgttaatataattattactaagaatgacagcaacaaaatgaataatcagtatatgtcatacctataaagttaaaatctaaaataatttgaagaaatacttaaaaatatttgcaaccctcaaagagataaagaaataatattcataaaattgaaatgacaaactaggggcagggcgcagtggctcacgcctgtaatcccagcactgtgggaggccgaggtgggtggatcacaaagtcaggagatcgagaccatcctggctaacacggtgaaaccctgtctctaataaaaatacaaaaacaaaattagccgggcgtggtggtgggcgcctgtagtcccagctactcaggaggctgaggagggagaatggcgtgaacccgggaggtggagcttgcagtgagccgagatcgcgccactgcactctagcctgggcaacagaatgagactgggtctcaaaacaaacaaacaaacaaacaaacaaactaggaagaatatacagaaatgtaacagaaagtagataggaagaagaatgaagtagaaatgcttgaaattagaaatacggtgattgaaattaaaaccttaacaaagtaaactctagactcacaacaattggagagttggtgattggaaagatgaaccaattaatttacccataacacattagagagaggtgaagaggaaaaaatagctaaatataaaagcacatttaagagacatgtaagatgattaaaagcctccaacatttttcaaaaaagagagtagaggcaatattataggtggaataatgaaaatgataatggctgagaatattaaagaattgagaataaaaaagacaagtggcctcagattgaaactgccatgaaggtctctgtctcaaattctcaactctgcttttgtagtatgaaagcagccgtagacaataagtaaatgaatggacatggctgtgtgtcaatacaacttgatttacaaaaacaggcaggcagcaggctaaattaggctgggaggtcatagtttgacagctcttgatctaaagaataaccattgttggccaggcgcagcggctcatgtctgtaatcacaacactttgggcggccaaggcgagcagatcacttgagcccaggagttcaagaccagcctgcgcaacatggcgaaaccccatctctactaaaagtacaaaaattagccgggcatggtggcaggctcctgtagtcccagctacttaggaggctgaggcaggagaatcgcttgaacctgggaggctgaggttgcagtgagcggagatggtgccactgcactccagcctggatgacagagccagactcggtctcgaaaataaataaagaataacctttgtttacattttcatgtatatgtctccagatgttcctcatatatccatataagtatgtatatatgatgtacataagtgcataagtaaaaatacataagtaattttaaaagaggttatatcatagctgaatcacacatgacttagaccacacttgctcttctgagtacccatttttggacaactctcagtgtccactagcatgtctaaaaaaaatttctcctcctaaaatgctaatgcatgatgtagattttaactacagcttttgaggctcagtggaggagagtgtacatcacactacccaatgcaaagccttttaacagccccttttgctcatctttgttttccttcactgttcctcgccctgcagcaggcagctgacattcacctttcccttccaccctcctctctcagcactggtcctttgcctcctccctcatcccagctctacaaatggcctcagcctgcatattccaaccacccagcaaaacaaacatctagtaactaccgggtcagcaagagaaaatcggaggccctagccatagatagatcaccttatcatttctccagcacattccaggaaggatctcaattcgttctgtcccaatatacctctacatcctttgttttgatgatcacatagaattcattgtatgcatatatcattatttatataactaagcccccaattttgaacaagaggctacatactgaaaatcttttatctaccaagtcttttttttcttacaaacccatccaatacagttgcactgtatccgccaatacagttcatgcaactgtatggaaagcaaactctagaagagtatttgatagctccataagaatattaaactcttatacttctagagcgtaaaaccccagaaaagtattttgtcagaaaaaaatcatgtttttgaaatagtaggttttaaaagaaaacaaagagagttagaagtaagaaaattcaggttatcaggggcttgatatcttttttttgtgactgtagtcaggttacccaggcctttgtggatcaatttctcaaacaaataacagagatgaaaacaactgtcagtagctactgtcacaaaaataatatgataaacatcttttcgtttcctatggctgccataactaattatcacaaacttggtggcttaaaataacagaaatgtattttctcacagctccagagtccagaattccaaaatggaagggtcagcaaggctgcacgccctcaaaacactcttggagagaatcttttcttgcttcatccagcttctgatggctctaggcaatcccccgcttgtcactgcatcactccggtctctgcccccatcttcaaatgaccttcctctgtgtccctgtcttctcttctgtctcttataaggacacttgtcattgtacagtatttagggtccacatagataatccaggaggatctcattttaagatccttaacttcattacatctgtacagatcctttgtccaaattaaggtaatgttcacaggttctgtgggttaggatgtggacatatcattttgaggcccaccattcaatgcactacaattttctttgtaagtgttctgagaacccaggaagaataagtaaatcctctgattcaatcaaaaatgagcagaatgtaaaccaaaaatactagaagatatcctttttcctaggcactggcatacgtttcaatagtatctctaattacagatgtatttacacttctaagtgtcagaaatgaagattattatgacaaatttaaaatttagtaacttgtttttaaactggtatttttgtttttttaagcgatcatctcagtccacattggaacgatctgaacagcagatcagggctgcttctagtttggaggaactacttcgaattactcactctgaggactggaagctgtggagatgcaggctgaggctcaaaagttttaccagtatggactctcgctcagcatcccatcggtccactaggtttgcggcaactttctatgacattgaaacactaaaaggtaggtgtgtggatgtggagacaaattctttctctttattagatagtgacaaacacacttactttctccaaaagtctgcgtagggcagacacgtgtcagagggagaatgaaagtcggtctttgatttccagtattagtgcagaatcttgattttttaatgtttacttcacagagaaatatattcaatatgattttgagataaaaaacacaaaagaacatctcaaaatatagaaataaatttaactcaaggatgtgggggcaaagaaaacccaggaagactattgttctcaatagaaaaacaatcatcaggtttacttagaaaataaaacctggggattcatccacaaggagtattctactgccatacatacatagacaaaaaccaaagatggccaggcatggtggctcatgcctgtaatcccagcactttgggaggccaagaacggcagatcgcttgagcccaggagtttgaaaccagcctgggcaacatgacgagaccccatctctacaaaaaaatagaaaaaaatagctgaacattgtggtacgtgcctgtattcccagctacttgggaggctgaggtgggaggatcggctgagcccaggaggtcgaggctgcagtgagccatgatcatgctactgcactccagcctgggcaacagagcaagatcctgtctcaaaaaaaccaccccctccccgaaccaatagattaggtatagcttttttttttatttctgcaaagttgtgtgattttttagtaaaagtgaaaagtaaaagttagacactgagttgtaatattgggtactggtattgctaggagaataatgaagggagaaaattctcaagacaaaatgatcaaaactccagactagaaaataacataatttgaaataaggataatgatcgttccctagtaacgtatgaagattctttaaaagaaaatcaggccaggtgtggtggatgacacctgtaatcccagcactttgggaggttgaggcaggtggatcacctgaggtcaggagttcgagaccagcctgaccaacatggtgaaaacccatctctactaaaaatacaaaattagccaggcatggcggtgcatgcctgtaatcccaactacttgggaggctgaggcaggagaatcacttgaacccaggaggcggaggttgcagtgagccaagattgcaccattgcactccaacctgggcaacaagagtgaaactccatcttaaaaaacaaaaaaacaaaacaaaacaaaacaaaaaaacaaagaaagaaagaaagaaaaccagtgtgagtaggtactgtcataatgaataaaatgcttgtcaagtaaagttctgtggtttctgattaggcacttaattttttgatgtcatgtcaaaacaacacaagaagctgctacagcattgctgatctagcattctagatttgattaacatgattacctggtaactgactatatatatagcataattcaaattaaccactaggccaaaactatttttttctttctacctaaaattgtatttgttttttcccatttgtaaaaagatgttggggttgcacagacctctgttgttggctgtggggagagctgtgcatagatggggacatattctttggtagcaccttgggcatgagtgtgaagaggattcttagtgttcatgtgtatgactgtgtgtctaagtgagttgatgtggtaggaaccatagcctcgagctcacttcagacagaaatttgaagctctagatgtttctatgtggtgaattaatatagccttcatgagaacaaagggttggcacctcatctagaggtcaaaggccttaaccagattacctgactgaaggcctgaggtgaacctggagctatttcatgaacatgaacgttaccataaaaccaagactaggtgatctaaaaaaagtcaatgacattgacattttctaaggagaaaaccattaaaatatcacggaatttgcaaaccctatgaatttatctcgtaatttctaggggatcatctgaagttatttactaagttagaagcagtcaataatgaaatcagcatgttacaccaattagaatttgttatcaactctcccttgtggatttcaaggtaatttcctgaggcagagcagtcctgctgggaagcagtaaagaatagtagagttatgaagcctttaatcagtgatgttggtcataattgcatatgattttgattaaaagcttaccactccaatttcaaaacttagttttataaaaagagaaaaagcaaatggaaagcaacctttaagtagaattttaaattgggaatattttcataggttggtttcttgttttttcaaggattcatgattaattatagtgaattaaataataaccataataatacttaattgagtaatttatctctcatgtgttcagccttcaggctttttatataaatattaataatcagaaatttttaaaaaggtttcttgggggctgggcacagtggctcacgcctttaatcccagcactttgggaggctgaggtgggcggatcacaaggttaagagatcaagaccagcctggccaacatggtgaaactccgtctctactaaaaatacaaaaattagctgggcatggtggcgcatacctgtaatcccagctacttgggaggctgaggcaggagaatcgcttgaacccaggaggtggaggttgcagtgagccgagatcgcgccgctgcactccagcctggcaacagagtgagaccccgtctcaaaaaaaaaaaaaaaagtttctcaggatagaatgttttattatgaggaaaaaaataaaaaaaaacaaagtttaggtagactgtgtagtataatgcagtgctccagacaactcatattatgttttcagtgattgaagaagcaacatatgaaaaaaattggtattaagggatgaaaaaggagaaaggaatggagaagatgttataagggaataatttagggactagggtcacatctcaaatggtaatattgtatcagtatacttcaagcagacgttttctctattccttctattcccctatatgggaattcaggataatctcaggagagttcttgaaaatgcagtaaaaataaaggagagtttgcctattgttgcataacacattaccacaaaacttagctacttaaaacaatatttatctcagtttctgtgggccagaaatgctgacatggcctagatcagtttttctgcttcagatgtctctggaggctgcagttaagatgttggcttgggctgcaggcatcttagggcacagctgaagcagagtgtgctttcaagttcagtcagctgttgtttgcaggactcaattcctcacaggctgttggactgagggtcttagttcctcgctggctattggccagaggctgcctcaagttccttgtcgtgtggacctttctaacatggcggcaaactaacacaagaactgaaaaccaaacaccgcatgttctcactcataagtgggagttgaacaatgagaacacatatacacaaggaggggaacatcacaaaccagggcctgttggtgggtggggggcaaagggagggagagcattaggacaaatacctaatgcatgcggggcttgaaacctagatgacgggttgacgggtgcagcaaaccaccgtggcacatgcatacctgtgtaacaaacctgcacgttctgcacatgtatcccagaacttaaagtaaaataagctaaaaaaaaaaaaaaaaaaaaaagcctgcaagtggagaaggaggagagagagagagagagtgtgtgtgagaaagtgagacagagtaagaaagaagggagcttgcaataagtagaaacaagactgcaatcttttttaacttcatcatggaagtggtatcccatcacttttgctgtattctcttcataagaagcaagttactaggttcagctcacacacgaggggaaggcatttacacaagggcatgactatcaggagatggggaccactgggggttagtttcaaagctgcctaccacaagagattttcaccagcaccacaaccccacacataataaataaactctacagttccatggcaagctacaaggaagtctttgtgttgtctttatcataaaattgaatctttcccccaaaacacctgtagaaaggctatgcagcattaagtatcaaagggtcaaaatctaatttaaaaaataaattatgagagaaaagcaagtactgttttacaagaaagtatataatttttttattcccataggcttctttttttgttaccttcaaattaactatggtcaaaggattgctcattccagtaataagaacaggcttatttcatcatttacataaatatcagtatcgggcacttgcaaatgagaaaactctgatttgagtaaggattagtttcacttcaatttccatttatgcgtttgccaagtttaaatcctactgtagttacttaagcaaccaacagaaacatatttcttgatgatgctaaaacctacctacacctggctttaaagcagaagaaatgctatccagctgtatcctataaattgcttgataaataatatttacatgttatttctttacacgcttctatttacttccctattaaccagcttctccagatgtattcagtgtaattatgtacaggacatggtgttctacctcaaagggaaataaaatacttatattctacaaggtatggtataaatgggaaagagcacagagattggttgtaacttctctgcaaacaatctttggttaaaggactgacaaaaaatatccatctagtaaaagaaacaagcagtagaaatgtgaaaatgactgtgttcagcataaccctggcacatgttggcacaccaggaccattccacctgctagccccagtgagctttctttctctctgcagttatagatgaagaatggcaaagaactcagtgcagccctagagaaacgtgcgtggaggtggccagtgagctggggaagagtaccaacacattcttcaagcccccttgtgtgaacgtgttccgatgtggtggctgttgcaatgaagagagccttatctgtatgaacaccagcacctcgtacatttccaaacaggtataaggacatcggcaagcctgccgtctctaaagccctgatgataatagtgttgatagctacaacaaccttgttgctaaacactgtactaaatgctttatgtgcataatcgcatttaatctttgaaacaaatcaagagggtattttatgctcctttatagatgaggaaactgaggctcagagaggtaacttacttatccaagtttacacggctgataaatagcagagctgggattcaaacccaggtctgtgggaggccagagcctgaactcttatcagttattgtctctctgatgctatgatgtcaagactcagaaaaccatatggaagttactaggacaggatgttaaaaggaatgaagatagctgatggcaggttctgtgttgctcaaatggagtgattgagaaaaatttaatgaaggttgtgggcagaattggggaaagagggatgggacagtgaagcacctgaagctagcaaaaagggtgagatttccccacccttcgactgaggagacaaggggagggagcagttatgggaacccagagggaaagcggagaagagggtttctggactggccactgtcaactcttagcctggcagggagtaggggcaggggctgggagaggcaagagggtttatagatgtagcccatggagggcagcgtcctggggcacagagcctgatggggaaggaaggggagaggatggtgtctctggaggggcaaagagagaatatctagcacaaaagacatttggaaataattctgcagtccccatgaaagaaataattcagccctcttcatcttataaatttccctttgcttagtaggtaagttttcctttctctggttaccatgtttttaataaatgtcgcatatgagagcagtagtaacaaacttgggaaagcaatactaaaaaactgtacatcaaactacattatttttggtatctgttgcaaattctttgaatgttgatatacttatttaattgtcagtttgcctatatggtttattctccttttaactgcaaaaagaggtagtacaagaaaattacatgcactgaatatatccatgttaggtaattttcttaatgctgatttgttttgttaatagatttacttatccttaattttgttcctccaccctctaaaatatcctttaaactgcagagtttctttttctaaattcttttagagaatcttggagcttgtgtgtattttaacctctactatttgacaattaggaaaaaaaaatgacccaagtagggctaagcatcaattctgagtagaaaaaaagcttgcataacgtaagagggtttagttcatgatcatgtgattccctagagcatagccaaaaaattgtgcaagaagatgaagtttatgcaaagtaaacactacaaaaacactctcactgagactcatggaagttccattacatattgagatgtcagaataaacacaaccttaatggattgcttccacttaatagatagttgagtactttattttgactgctgtactcaacaaatgattaatttcatacaatgtacttaagtgtaagtgtacagcagtttttcttccaaatatgcatttttgaacattttaatagtagttttttaaaaactatctctcgccccaaagttatggactatttggcaaaccacctcttagaaacaaagtgaacaaatgaatactctatgtagtaaggactacatggaatggtgattgaatagacaatgcattaaaatcaacttcaaactcatccacacatcatagaaccactcaagaaagttgtgtaatctctctgtacatctgtttcttcacctgtaagatggggataataaaaacccaccccataatgttgttataaggggtaaatgagttaacatgaaagcacttacaacagggcctggcctacggaaagcgtagaaagaatgatatacatgttagctataattatttgtttgggcatgatgatcttgtatcagtcagctattaatacacagtgctacgtaacaaacacactaaaactcagtggttccaaacaacaatgatttactctcacttatgtatctgaggttcagttagtttagggtggattcagctgggcttgactctaagctgcagtgtgagtccaagtcaacttctatgtttcccatcgcttggaccagcaagcctgccggattatgttcttttcatggctatagcataagtttgagaaaacaagccccataaaacatgcacagttcaaatttgtacttctgtcatgtctgctaacatcccactagccaaagaaagtgacatggccaaataaaaagtcaagagacaggaaactatatttcttcaatagagatggtgtgagaagggatgaataaatagtttgaataataatctattctaataaaatcctaaagaaactgcatagctttaatctcatttaacccttacgatttacactcaaatttaaagcaggagcagggattaacagtaccattttacaagagtatcaatgatcaaaaagttaaaagatttgaccaaacttaaacacttcataaagttagatgagcctgtttagttccattcttaatggacaacttggctaaagtcattgccgtaaatgacaaaggcaaaaattcagactagaacaactttaaaaatgatatataaaattaaaaaaatatattgtggttatctttctctgctgtagctctttgagatatcagtgcctttgacatcagtacctgaattagtgcctgttaaagttgccaatcatacaggttgtaagtgcttgccaacagccccccgccatccatactcaattatcagaagatccatccagatccctgaagaagatcggtaagcacttttgtttttttttttatactggattatgcttatttttgccttgccaaaactgtgtgtagaggatttttcattaatgtagagttatcaatttatcttcaaattattcatattttagcttctaacctgaacctactggtaataactggcaaatacatatttttattagatgttagatatatattgtggtaggaccaaaacgctcagtggtatgagcttgtcatgtctacttgtagacacgtttgttcttaatatgcatagtctactgcaggtgtaaaaccgctgtaacctcaaatttagcacatgttccagaacaagcattaaataaaacttatttcaggctgtttgtatatttacatcctgaaatgagagaaaacaaagaagattcctggggtcattggggagtgacaaaactagcagcacgtgagttttgcaactttctaatctttcccccttaagattaccaaatggaaaacccttattttaaattaaaatgacttaaaattaatttggctttgaaattctcttgagattaattttgtgattatttataagacaaacgacaaaaccaaaggtaaggatcacttatttgaagaaaaaaaaggatttaatataaagaaacaagtaaagggtaactgaatgaaaagatcattagttagatacttagactttgcaaaagtaaagcaataaatatattgtgtgagtggcaagtaaaagagtaagctggtgattagttaacattgaaccaagaagacacctcccgcctctctccagcagaaaagaaaacttgtagaaaagcaacatttattctcaagatgttcctgctgttctggccaatgcttttatctttattttaaagaaaataatcttaggggccgggcacggtggctcacacctgtaatcccagcagtatgggaggctgaggcgggcagatcacgaggtcaggagattgagaccatcctggctaacacggtgcaactccgtctctactaaaaatataaaaaaaaattagccgggtgtggtggtgggtgcctgtagtcccagttacttgggaggctgaggcaggagaatggcatgaacctgggaggtggagcttgcagtgagccgagatcgcgccactgcactccagcctgggcaacagagggagactccgtcaaaaaaaaaagaaaagaaaataatcttaggaggtatgttagaacatatttaattttcgtaaataaactgttgacagctataatttgcatagttttaacatataccttcttaagaagattacaatttccaaaattacagtttagtttctaaacatttccacgtagaatatttataattacagaatcactatctagtaagatgcagttcataaatacaaattaagctcctttaaaatcttttttttttttgagacggagtttcgctcttgttgccccggctggagtgcaatggcgagatctcggctcactgcaacctccgcctcccaggttcaagtgattctcctgcctcagccttccaagtagctgggattacaggcatgtgccgccacgcccggctaattttgtatttttcagtagagatggggtttctccatattagtcaggctggtctcgaactcccgacctcaggtgatctgcccgcctcggactcccaaagtgctgggattacaggcgtgagccaccgcacctggcccgctcctttaaaatcttaactcttctcacatccttatcattttgtggtgagaacatttgaaatttactctcttagcaatttggaaatataaaatacattattattattgactatagttaccatgctgtgcaatagatctcaaaaccttatttctccaaactgagtataaaaagcaaaaaataaatttaaaaaatcttaactattatctactcaggaatttatttaatgttccaaagttttgattatccttgaaagcttttaaatctggttcattgttttcttttcctagctgttcccattccaagaaactctgtcctattgacatgctatgggatagcaacaaatgtaaatgtgttttgcaggaggaaaatccacttgctggaacagaaggtaatgatagtagtagtaaaataataacagtaataataaaagtagcaacaatagcagcaaccgttattgagtacttagtatgaccagacaatgttgtaaatcttgtatatgttttaactcatttaattctcacaacaaccctgtaatgtactattgttatttctttttttacaattacaaaatgggcacaccaagatatcgagtaatttcctcaaggtcacacagctgagagtgatagaagtggtcagattccagaaccctctgtaccataatcatatagtaagtccatcaatgcatcactctgctttttaatctcaaagaaaagcccagagtggttggagcatcctgaaacactgaaattgaaaggggatgttaaacttgaatgaaagctgcttcagaactaaatactagtcaactgcagtttactaatttatttgtataaaagtctcacaggaacataaagtaattttggacttggtttctgtcagctgcatcatatgaaaacacgccagtaatttgaaaaaagaaatggagaataagagaaaatttttctggaattagggcaaagcaaaagcaaaatatggctattggtctaaggggagctgggagcaaaatgagatatagtcaaattgtcattgctcataatccgtaattctgtgactttgggtgatgaacatttgcttgaaaatgaatgcattttaatgtattttccagagagctttacatggttccaccaaaaaaaaaaaagaaagaaaaaaaaagtcacaagtagtcatgcagttttaaccttgcttgttttaaactataatctataagcaagaacagtaagggctaaactctaagaaatctgtcctataaactgtaaatagcaacctactctccattcttctgcctctcagcttccttctaaatgttttcacgaaagctcagcccagagcatgtggggaaatttaatatttatgtggtttaaatgcccatgccgatcttgaatgttctttacacccttcccaccaagtgttcagccatcctctaccagaacatacatcagttatttggagactcgccatccagtgaggcagcaccaaggggtgggcacactcctgttgttatactgaaatgaaatctctctccagaacagaccagactgcccaatggaatacaataagagtcatatatgtaactcacattttacattaaaaagataaaaagaaacaagtgaaatttatcttaatatattttatttaatccaatctatccaatgtactatcatttcaacatgcaatcaatataaaaaatttatgagctagcctacattctttgtgctaagtctttgaaatccagtgtgtgttgtacacttacagcacatctcaatttagactctctatttcatgcccaatagtcacatatggcccatagctaccttgttggacagcccagctcaagagcatcaactcattagttcaggttttaccctatagaaccatgtaaaacaaatctaattctttctccatgtgactcatgttctaaaagtgttagaaaatttttgtggggttggccgggaatggtggctcatgcctgtaatcctagcactttgggaggccgagatgggaggatcacttgaggttgggagtttgaaaaccagccgggccggccgggcgcggtggctcacgcctgtagtcccagcactttgggaggccgaggcgggcggatcacgaggtcaggagattgagaccatcctggctaaaacggtgaaaccccgtctctactaaaaatacaaaaaaaaaattagccgggcgtagtggcgggcgcctgtagtcccagctacttgggaggctgaggcaggagaatggcgtgaacccgggaggcggagcttgcagtgagccgagatcccgccactgcactccagcctgggcaacagagcgagactccgtctcaaaaaaagaaaaaaaaaaaaaagaaaaccagccgggccaacatggcgaaatcccatctctactactactaaaaaaaaaaaaaaaaaaaaaaaaaaaaaaaaaaaaatagctgggcatggtgatgtgcgcctgtagtcccagctactcaggaggctgaggcatgagaatctcttgaacctgggaggcagaggttgcagtgagccgaggtcatgccaccgcactcgggcctggatgacagagtgagactctgcctccaaaaaaagaaagaaagaaagaaagagagaaagagaaaaagaaaagaaaagaaagagagagagagagaaagaaagaaagaaaagaaaagaaagagagagaaagaaagaaagaaaagaaagaaaaagaaaggaaggaaggaaggatagaaagaaagaaagagaaagaaagtaagttactgtgggaagggcaatatacttagagcttaaaggctctagctgaggatttcctggcacaaagcctctgagacagttttgtacggaggaggtttgtaggcaggcacaaggcattaaagggtaaagagagaggcagcagaccacagcgcagttgctaagaggcatcagcctaagccaatgggaagttgaagctgggaacccctgcgggggtaagtcttaaatctaggtgaagaggctgagccctgtagaccgttcattggctgccttggagaggggatgtagccttaggagaggcagcttatttctgctggagataattcttgggaaggcactcagccagtacacgtgtgtagagggtggtaagaagaatagggaagaagagaagtgctgttctaagcagcgggtatatgagcactcagggctggaggtgagagaacatactggaagaagttcagcatggtggggatataatgggtggggacataatggggaaggggctggttagatgtgagagaagaagctggacaggctcacaggggcaaagcagaaggaccttgtaattcttgcatgggagcttggatgtgatactaaggacaaagggaaaccacacaactggctaaagcaggagagtgacagtacccattagaattttaacaaaatcatatcagcaacagtgtagaagaggatgtgttgactcggggcagggaaggaggcaggaaaccttttgggaagttgtagcaatgatgtaagtgagaggcgcagggtggactggatcacaattgtttctcattctcatctcctataagtccccaatgtggatcaagttcacattcatttctccagtggccccatcaaattgatgggatttactgagcttactgctcactatactttttttccgcacatgtgactgttaagccaactgccttttctacagtgacttctcttgcccagatgagcacatttaggttagtgaatccaagtctaatttaattgagtcttgttagagtcaggtcattgctctaaattgttaaaacaaacgatatacacaaacacacacacacacaaaagaataaattgaggaggtcccaattctgtattttaaaatacttaatatatcccttccttcttgaagagagctacaatttcaagaatttattttgaaaaaattctatcagtttattgataaaaatggtaaaaggaacaaagctgagaacagaacatatcatcagactctctagggacggaaatcaatacataatacttcaagatatcaccctcagctacttgctgttccaccaccagttctcttgcatccagtttttgtttcttttaacttggctataaggatgtgagcacagactctgccaaacagcctgctgaagttctgcaaacaccttgtggattgtgtttccctgaacaaccctgtccaacaatggccttgggcctgtctgaagtattcttagtgaacttctgctgccacctagtgatcattgcgaatttttaaaaagcctctttatcctttaacaagttactcttgtcttaccccaaagcggcatctgcctcactggcatatgacttacagagctcacattttccctctccacaaagttcaaaatggagacttctcagatttagccttccagcacccattctcaaacgtcgtgcattacagaaaagtttaaactataaagttgaaccgcacgagattctcattttgatatgtcattaaagtcagatattggcaagaacatatggtttaacccaatggcttggaatgctggatgggattcccagaagctccatacatcggcctgcttcaggacccttttattacaccaaataaacccaacaaacatccatcgagtgcctattttatatcagaacaatgagacctgctccttctccttcaggacattttacttaatgggggaaacatacaagtaaacagacaaatgtaatcagtgcaagaaagaatcggacagcaatatgcacaggataaggacacttagctaaacctgcagacattgggaaagatgtcagggaaaagggatggcagaaggaaagacaaggccaaaggcatgggactgggaggcactggaatatcagggcaacagaaagtgctgtcatttggtataaatggaacacacaggatatatgaaagcaagaaacagaagatgagtctgtgaggttactatgatccagttcatggagggccttgtatgtcctggtgggaaaattggtttttattgtgggaagggaaccttttaatgcattcaaagcagtggaatgaagtgatttggtttgcatttgttaatcatgtgaagaagaataggttggagggataaaacttgtggtggtgagatgagtgacagagcgacagccatctacaaaagaaacacaaggtacagactgaattgtgggagtggtagtggggatggaaaataaagaacaaatttagagaggcagaactgagtggacatgatgctcagacttaccagagcaggtgagtcaagaatgatgtcaccattccctaaatgaggcaaactgggagagaagcagatttggggagaaaactactaaacatgtacgtccctccaaaaccttcaagaatgctaaagggacagagtcaagttcttccaaagtttctgtctcttccatttattttgcaatgaatttcaacttgttaatcagaaatggatttggagtagtagctattcaattgttttatacaccttctagaagaaatatttgtcagatgagtatgtcaaaaacttctcagaccctcccctttacttgaatgtatcttccagcagatgttggtggaatcaaagttcattattactcctatatcttttatactagtgttatgatctgcagtgaggacatgcattgctattgctacgcctggcctggaatgtctgaggtgtatttctacaacaccaattattttgtgtgtctctccttttaatctccaccaaaaaatggagacagctagattcataacccttagacatcctatattttattactaatacttggttgtggaagtttgcattctaaacaagtcatcaacataaaaatctctaaaaatattttatgaaaaatattcagcttatgatattttaaaaatcacaaacctaagaaaacacacaaacctgtgtttgtattgtgaaatcagaggttaatcttcctcaccctgtgaaaaaattaggggcataaatctataggaaggagattgggtgaatccaagttacttacggatgacataaaagatacaatcaactttggtgatccaattgccacactacaactatctgaccaacacgtttctgtttctctttagaccactctcatctccaggaaccagctctctgtgggccacacatgatgtttgacgaagatcgttgcgagtgtgtctgtaaaacaccatgtcccaaagatctaatccagcaccccaaaaactgcagttgctttgagtgcaaagaaagtctggagacctgctgccagaagcacaagctatttcacccagacacctgcaggtaaatgccttgagttgtcttgcctttactcatgacatttaacgtagatgccattttaatttggtgggattccttagtaagctaatttttccccttggtgcctgagtcccttttggataatagaacagaggtttagcagctaaggaataagcaagagtataccgagtcatgattaatcatgaaaataagaaaatcaatcctgcctgttattatgtgtgtagagctttttttttttagacggagtctcgctctgtctccaggctggagtgcagtggcgtgatctgggctcactgcaacctccgtctctctggttcaagggagtctcctgcctcagcctcccaagtagctgggattacaggcacgtgccaccacacccagctaatttttgtatttcagtagagacggggtttcaccatgttggccaggatagtcttgatctcctgacctcatgatccacccgtctcggcctcccaaagtgctgggattacaggcatgagccaccgcgcccacccggggtttagagctcttaaacaacaatgaaattggtaaaatttaagcagttattaggatattgcttaataataatattttaggaaggggaggtttcagatcatcaacctgtttagttcaatctctcattgtttatgtctatatatgtttgtttttttctttaatggagggaatatcattggatttatatagcaagtaatttattcatgaatagaacacttggaggttactgattcacttcagtagattttgaatccatgtgggataaccatgcaggattttatactgacattttaaatacatgtctggaaaacttaatcaaatcagagcagagttattcttttgaatccagtcattgattctgaattctcatctttattttcttttgcaacagctgtgaggacagatgcccctttcataccagaccatgtgcaagtggcaaaacagcatgtgcaaagcattgccgctttccaaaggagaaaagggctgcccaggggccccacagccgaaagaatccttgattcagcgttccaagttccccatccctgtcatttttaacagcatgctgctttgccaagttgctgtcactgtttttttcccaggtgttaaaaaaaaaatccattttacacagcaccacagtgaatccagaccaaccttccattcacaccagctaaggagtccctggttcattgatggatgtcttctagctgcagatgcctctgcgcaccaaggaatggagaggaggggacccatgtaatccttttgtttagttttgtttttgttttttggtgaatgagaaaggtgtgctggtcatggaatggcaggtgtcatatgactgattactcagagcagatgaggaaaactgtagtctctgagtcctttgctaatcgcaactcttgtgaattattctgattcttttttatgcagaatttgattcgtatgatcagtactgactttctgattactgtccagcttatagtcttccagtttaatgaactaccatctgatgtttcatatttaagtgtatttaaagaaaataaacaccattattcaagccatataa

SEQ ID NO: 84 - DNA, 1725 bp, Homo sapiens
ctatggagtttgcataacaaacgtttggcagctcgctctcttacactccattaacaagctgtaacatatagctgcaggttgctataatctcattaatattttggaaacttgaatattgagtatttctgagtgctcattccccatatgccagccacttctgccatgctgactggttcctttctctccattattagcaattagcttcttaccttccaaagtcagatccaaggtatccaagatactagcaaaggaatcaactatgtgtgcaagttaagcatgcttaatatcacccaaacaaacaaagaggcagcatttcttaaagtaatgaagatagataaatcgggttagtcctttgcgacactgctggtgctttctagagttttatatattttaagcagcttgctttatattctgtctttgcctcccaccccaccagcacttttatttgtggagggttttggctcgccacactttgggaaacttatttgatttcacggagagctgaaggaagatcatttttggcaacagacaagtttaaacacgatttctatgggacattgctaactggggcccctaaggagaaaggggaaactgagcggagaatgggttaaatccttggaagcaggggagaggcaggggaggagagaagtcggaggagtataaagaaaaggacaggaaccaagaagcgtgggggtggtttgccgtaatgtgagtgtttcttaattagagaacggttgacaatagagggtctggcagaggctcctggccgcggtgcggagcgtctggagcggagcacgcgctgtcagctggtgagcgcactctcctttcaggcagctccccggggagctgtgcggccacatttaacaccatcatcacccctccccggcctcctcaacctcggcctcctcctcgtcgacagccttccttggcccccaccagcagagctcacagtagcgagcgtctctcgccgtctcccgcactcggccggggcctctctcctcccccagctgcgcagcgggagccgccactgcccactgcacctcccagcaaccagcccagcacgcaaagaagctgcgcaaagttaaagccaagcaatgccaaggggaggggaagctggaggcgggctttgagtggcttctgggcgcctggcgggtccagaatcgcccagagccgcccgcggtcgtgcacatctgacccgagtcagcttgggcaccagccgagagccggctccgcaccgctcccgcaccccagccgccggggtggtgacacacaccggagtcgaattacagccctgcaattaacatatgaatctgacgaatttaaaagaaggaaaaaaaaaaaaaaacctgagcaggcttgggagtcctctgcacacaagaacttttctcggggtgtaaaaactctttgattggctgctcgcacgcgcctgcccgcgccctccattggctgagaagacacgcgaccggcgcgaggagggggttgggagaggagcggggggagactgagtggcgcgtgccgctttttaaaggggcgcagcgccttcagcaaccggagaagcatagttgcacgcgacctggtgtgtgatctccgagtgggtgggggagggtcgaggagggaaaaaaaaataagacgttgcagaagagacccggaaagggccttttttttggttgagctggtgtcccagtgctgcctccgatcctgagcctccgagcctttgcagtgcaa

SEQ ID NO: 85 - protein, 159 aa, Artificial
  DHFR destabilizing sequence
MISLIAALAVDYVIGMENAMPWNLPADLAWFKRNTLNKPVIMGRHTWESIGRPLPGRKNIILSSQPSTDDRVTWVKSVDEAIAACGDVPEIMVIGGGRVIEQFLPKAQKLYLTHIDAEVEGDTHFPDYEPDDWESVFSEFHDADAQNSHSYCFEILERR

SEQ ID NO: 86 - DNA, 483 bp, Artificial
  DHFR destabilizing sequence
ggtaccatcagtctgattgcggcgttagcggtagattacgttatcggcatggaaaacgccatgccgtggaacctgcctgccgatctcgcctggtttaaacgcaacaccttaaataaacccgtgattatgggccgccatacctgggaatcaatcggtcgtccgttgccaggacgcaaaaatattatcctcagcagtcaaccgagtacggacgatcgcgtaacgtgggtgaagtcggtggatgaagccatcgcggcgtgtggtgacgtaccagaaatcatggtgattggcggcggtcgcgttattgaacagttcttgccaaaagcgcaaaaactgtatctgacgcatatcgacgcagaagtggaaggcgacacccatttcccggattacgagccggatgactgggaatcggtattcagcgaattccacgatgctgatgcgcagaactctcacagctattgctttgagattctggagcggcgataa

SEQ ID NO: 87 - DNA, 474 bp, Artificial
  Destabilizing domain
atcagtctgattgcggcgttagcggtagattacgttatcggcatggaaaacgccatgccgtggaacctgcctgccgatctcgcctggtttaaacgcaacaccttaaataaacccgtgattatgggccgccatacctgggaatcaatcggtcgtccgttgccaggacgcaaaaatattatcctcagcagtcaaccgagtacggacgatcgcgtaacgtgggtgaagtcggtggatgaagccatcgcggcgtgtggtgacgtaccagaaatcatggtgattggcggcggtcgcgttattgaacagttcttgccaaaagcgcaaaaactgtatctgacgcatatcgacgcagaagtggaaggcgacacccatttcccggattacgagccggatgactgggaatcggtattcagcgaattccacgatgctgatgcgcagaactctcacagctattgctttgagattctggagcggcga

SEQ ID NO: 88 - protein, 112 aa, Artificial
  FKBP12 destabilizing
MGVEKQVIRPGNGPKPAPGQTVTVHCTGFGKDGDLSQKFWSTKDEGQKPFSFQIGKGAVIKGWDEGVIGMQIGEVARLRCSSDYAYGAGGFPAWGIQPNSVLDFEIEVLSVQ

SEQ ID NO: 89 - DNA, 10 bp, Homo sapiens
ccggcccgac

SEQ ID NO: 90 - DNA, 17 bp, Homo sapiens
aaataaaatacgaaatg

SEQ ID NO: 91 - skipped

SEQ ID NO: 92 - protein, 20 aa, Homo sapiens
MYRMQLLSCIALSLALVTNS

SEQ ID NO: 93 - protein, 640 aa, Escherichia coli
AKAAAIGIDLGTTYSCVGVFQHGKVEIIANDQGNRTTPSYVAFTDTERLIGDAAKNQVALNPQNTVFDAKRLIGRKFGDPVVQSDMKHWPFQVINDGDKPKVQVSYKGETKAFYPEEISSMVLTKMKEIAEAYLGYPVTNAVITVPAYFNDSQRQATKDAGVIAGLNVLRIINEPTAAAIAYGLDRTGKGERNVLIFDLGGGTFDVSILTIDDGIFEVKATAGDTHLGGEDFDNRLVNHFVEEFKRKHKKDISQNKRAVRRLRTACERAKRTLSSSTQASLEIDSLFEGIDFYTSITRARFEELCSDLFRSTLEPVEKALRDAKLDKAQIHDLVLVGGSTRIPKVQKLLQDFFNGRDLNKSINPDEAVAYGAAVQAAILMGDKSENVQDLLLLDVAPLSLGLETAGGVMTALIKRNSTIPTKQTQIFTTYSDNQPGVLIQVYEGERAMTKDNNLLGRFELSGIPPAPRGVPQIEVTFDIDANGILNVTATDKSTGKANKITITNDKGRLSKEEIERMVQEAEKYKAEDEVQRERVSAKNALESYAFNMKSAVEDEGLKGKISEADKKKVLDKCQEVISWLDANTLAEKDEFEHKRKELEQVCNPIISGLYQGAGGPGPGGFGAQGPKGGSGSGPTIEEVD

SEQ ID NO: 94 - DNA, 1983 bp, Escherichia coli
atgtaccggatgcagctgctgagctgtatcgccctgtctctggccctggtcaccaattctgccaaagccgcggcgatcggcatcgacctgggcaccacctactcctgcgtgggggtgttccaacacggcaaggtggagatcatcgccaacgaccagggcaaccgcaccacccccagctacgtggccttcacggacaccgagcggctcatcggggatgcggccaagaaccaggtggcgctgaacccgcagaacaccgtgtttgacgcgaagcggctgatcggccgcaagttcggcgacccggtggtgcagtcggacatgaagcactggcctttccaggtgatcaacgacggagacaagcccaaggtgcaggtgagctacaagggggagaccaaggcattctaccccgaggagatctcgtccatggtgctgaccaagatgaaggagatcgccgaggcgtacctgggctacccggtgaccaacgcggtgatcaccgtgccggcctacttcaacgactcgcagcgccaggccaccaaggatgcgggtgtgatcgcggggctcaacgtgctgcggatcatcaacgagcccacggccgccgccatcgcctacggcctggacagaacgggcaagggggagcgcaacgtgctcatctttgacctgggcgggggcaccttcgacgtgtccatcctgacgatcgacgacggcatcttcgaggtgaaggccacggccggggacacccacctgggtggggaggactttgacaacaggctggtgaaccacttcgtggaggagttcaagagaaaacacaagaaggacatcagccagaacaagcgagccgtgaggcggctgcgcaccgcctgcgagagggccaagaggaccctgtcgtccagcacccaggccagcctggagatcgactccctgtttgagggcatcgacttctacacgtccatcaccagggcgaggttcgaggagctgtgctccgacctgttccgaagcaccctggagcccgtggagaaggctctgcgcgacgccaagctggacaaggcccagattcacgacctggtcctggtcgggggctccacccgcatccccaaggtgcagaagctgctgcaggacttcttcaacgggcgcgacctgaacaagagcatcaaccccgacgaggctgtggcctacggggcggcggtgcaggcggccatcctgatgggggacaagtccgagaacgtgcaggacctgctgctgctggacgtggctcccctgtcgctggggctggagacggccggaggcgtgatgactgccctgatcaagcgcaactccaccatccccaccaagcagacgcagatcttcaccacctactccgacaaccaacccggggtgctgatccaggtgtacgagggcgagagggccatgacgaaagacaacaatctgttggggcgcttcgagctgagcggcatccctccggcccccaggggcgtgccccagatcgaggtgaccttcgacatcgatgccaacggcatcctgaacgtcacggccacggacaagagcaccggcaaggccaacaagatcaccatcaccaacgacaagggccgcctgagcaaggaggagatcgagcgcatggtgcaggaggcggagaagtacaaagcggaggacgaggtgcagcgcgagagggtgtcagccaagaacgccctggagtcctacgccttcaacatgaagagcgccgtggaggatgaggggctcaagggcaagatcagcgaggcggacaagaagaaggttctggacaagtgtcaagaggtcatctcgtggctggacgccaacaccttggccgagaaggacgagtttgagcacaagaggaaggagctggagcaggtgtgtaaccccatcatcagcggactgtaccagggtgccggtggtcccgggcctgggggcttcggggctcagggtcccaagggagggtctgggtcaggccccaccattgaggaggtggattaa

SEQ ID NO: 95 - protein, 512 aa, Artificial
  Ranibizumab
MYRMQLLSCIALSLALVTNSEVQLVESGGGLVQPGGSLRLSCAASGYDFTHYGMNWVRQAPGKGLEWVGWINTYTGEPTYAADFKRRFTFSLDTSKSTAYLQMNSLRAEDTAVYYCAKYPYYYGTSHWYFDVWGQGTLVTVSSASTKGPSVFPLAPSSKSTSGGTAALGCLVKDYFPEPVTVSWNSGALTSGVHTFPAVLQSSGLYSLSSVVTVPSSSLGTQTYICNVNHKPSNTKVDKKVEPKSCDKTHTGKRKRRGSGEGRGSLLTCGDVEENPGPMYRMQLLSCIALSLALVTNSDIQLTQSPSSLSASVGDRVTITCSASQDISNYLNWYQQKPGKAPKVLIYFTSSLHSGVPSRFSGSGSGTDFTLTISSLQPEDFATYYCQQYSTVPWTFGQGTKVEIKRTVAAPSVFIFPPSDEQLKSGTASVVCLLNNFYPREAKVQWKVDNALQSGNSQESVTEQDSKDSTYSLSSTLTLSKADYEKHKVYACEVTHQGLSSPVTKSFNRGEC

SEQ ID NO: 96 - protein, 20 aa, Artificial
  Ranibizumab leader sequence
MYRMQLLSCIALSLALVTNS

SEQ ID NO: 97 - protein, 127 aa, Artificial
  Ranibizumab heavy variable
EVQLVESGGGLVQPGGSLRLSCAASGYDFTHYGMNWVRQAPGKGLEWVGWINTYTGEPTYAADFKRRFTFSLDTSKSTAYLQMNSLRAEDTAVYYCAKYPYYYGTSHWYFDVWGQGTLVTVSSASTK

SEQ ID NO: 98 - protein, 102 aa, Artificial
  Ranibizumab heavy constant
VFPLAPSSKSTSGGTAALGCLVKDYFPEPVTVSWNSGALTSGVHTFPAVLQSSGLYSLSSVVTVPSSSLGTQTYICNVNHKPSNTKVDKKVEPKSCDKTHTG

SEQ ID NO: 99 - protein, 18 aa, Artificial
  Ranibizumab heavy constant
EGRGSLLTCGDVEENPGP

SEQ ID NO: 100 - protein, 104 aa, Artificial
  Ranibizumab light chain
DIQLTQSPSSLSASVGDRVTITCSASQDISNYLNWYQQKPGKAPKVLIYFTSSLHSGVPSRFSGSGSGTDFTLTISSLQPEDFATYYCQQYSTVPWTFGQGTKV

SEQ ID NO: 101 - protein, 110 aa, Artificial
  Ranibizumab light constant
EIKRTVAAPSVFIFPPSDEQLKSGTASVVCLLNNFYPREAKVQWKVDNALQSGNSQESVTEQDSKDSTYSLSSTLTLSKADYEKHKVYACEVTHQGLSSPVTKSFNRGEC

SEQ ID NO: 102 - DNA, 1539 bp, Artificial
  Ranibizumab
atgtaccggatgcagctgctgagctgtatcgccctgtctctggccctggtcaccaattctgaggtgcagctggtggaatctggcggcggacttgttcaacctggcggctctctgagactgagctgtgccgcttctggctacgacttcacccactacggcatgaactgggtccgacaggcccctggcaaaggccttgaatgggtcggatggatcaacacctacaccggcgagccaacatacgccgccgacttcaagcggagattcaccttcagcctggacaccagcaagagcaccgcctacctgcagatgaacagcctgagagccgaggacaccgccgtgtactactgcgccaagtatccctactactacggcaccagccactggtactttgacgtgtggggacagggcacactggtcacagtgtctagcgcctctacaaagggccccagcgttttcccactggctcctagcagcaagtctaccagcggaggaacagccgctctgggctgtctggtcaaggactactttcccgagcctgtgaccgtgtcctggaattctggcgctctgacaagcggcgtgcacacctttccagctgtgctgcaaagcagcggcctgtactctctgagcagcgtcgtgacagtgccaagcagctctctgggcacccagacctacatctgcaatgtgaaccacaagcctagcaacaccaaggtggacaagaaggtggaacccaagagctgcgacaagacccacaccggcaagcggaagagaagaggctctggcgaaggcagaggcagcctgcttacatgtggcgacgtggaagagaaccccggacctatgtatagaatgcagctcctgtcctgcattgccctgagcctggctctcgtgaccaacagcgacatccagctgacacagagccccagcagcctgtctgcctctgtgggagacagagtgaccatcacctgtagcgccagccaggacatctccaactacctgaactggtatcagcaaaagcccggcaaggcccctaaggtgctgatctacttcacaagcagcctgcactccggcgtgcccagcagattttctggctctggcagcggcaccgacttcaccctgaccatatctagcctgcagcctgaggacttcgccacctactactgccagcagtacagcaccgtgccttggacatttggccagggcacaaaggtggaaatcaagcggactgtggccgctcctagcgtgttcatctttccacctagcgacgagcagctgaagtctggcacagcctctgtcgtgtgcctgctgaacaacttctaccccagagaagccaaggtgcagtggaaagtggacaatgccctgcagagcggcaacagccaagagagcgtgacagagcaggactccaaggatagcacctatagcctgagcagcaccctgacactgagcaaggccgactacgagaagcacaaagtgtacgcctgcgaagtgacccaccagggcctttctagccctgtgaccaagagcttcaaccggggcgaatgttaa

SEQ ID NO: 103 - protein, 732 aa, Artificial
  Bevacizumab
MYRMQLLSCIALSLALVTNSEVQLVESGGGLVQPGGSLRLSCAASGYTFTNYGMNWVRQAPGKGLEWVGWINTYTGEPTYAADFKRRFTFSLDTSKSTAYLQMNSLRAEDTAVYYCAKYPHYYGSSHWYFDVWGQGTLVTVSSASTKGPSVFPLAPSSKSTSGGTAALGCLVKDYFPEPVTVSWNSGALTSGVHTFPAVLQSSGLYSLSSVVTVPSSSLGTQTYICNVNHKPSNTKVDKKVEPKSCDKTHTCPPCPAPELLGGPSVFLFPPKPKDTLMISRTPEVTCVVVDVSHEDPEVKFNWYVDGVEVHNAKTKPREEQYNSTYRVVSVLTVLHQDWLNGKEYKCKVSNKALPAPIEKTISKAKGQPREPQVYTLPPSREEMTKNQVSLTCLVKGFYPSDIAVEWESNGQPENNYKTTPPVLDSDGSFFLYSKLTVDKSRWQQGNVFSCSVMHEALHNHYTQKSLSLSPGKRKRRGSGEGRGSLLTCGDVEENPGPMYRMQLLSCIALSLALVTNSDIQMTQSPSSLSASVGDRVTITCSASQDISNYLNWYQQKPGKAPKVLIYFTSSLHSGVPSRFSGSGSGTDFTLTISSLQPEDFATYYCQQYSTVPWTFGQGTKVEIKRTVAAPSVFIFPPSDEQLKSGTASVVCLLNNFYPREAKVQWKVDNALQSGNSQESVTEQDSKDSTYSLSSTLTLSKADYEKHKVYACEVTHQGLSSPVTKSFNRGEC

SEQ ID NO: 104 - protein, 20 aa, Artificial
  Bevacizumab leader sequence
MYRMQLLSCIALSLALVTNS

SEQ ID NO: 105 - protein, 127 aa, Artificial
  Bevacizumab heavy variable
EVQLVESGGGLVQPGGSLRLSCAASGYTFTNYGMNWVRQAPGKGLEWVGWINTYTGEPTYAADFKRRFTFSLDTSKSTAYLQMNSLRAEDTAVYYCAKYPHYYGSSHWYFDVWGQGTLVTVSSASTK

SEQ ID NO: 106 - protein, 322 aa, Artificial
  Bevacizumab heavy constant
VFPLAPSSKSTSGGTAALGCLVKDYFPEPVTVSWNSGALTSGVHTFPAVLQSSGLYSLSSVVTVPSSSLGTQTYICNVNHKPSNTKVDKKVEPKSCDKTHTCPPCPAPELLGGPSVFLFPPKPKDTLMISRTPEVTCVVVDVSHEDPEVKFNWYVDGVEVHNAKTKPREEQYNSTYRVVSVLTVLHQDWLNGKEYKCKVSNKALPAPIEKTISKAKGQPREPQVYTLPPSREEMTKNQVSLTCLVKGFYPSDIAVEWESNGQPENNYKTTPPVLDSDGSFFLYSKLTVDKSRWQQGNVFSCSVMHEALHNHYTQKSLSLSPG

SEQ ID NO: 107 - protein, 104 aa, Artificial
  Bevacizumab light variable
DIQMTQSPSSLSASVGDRVTITCSASQDISNYLNWYQQKPGKAPKVLIYFTSSLHSGVPSRFSGSGSGTDFTLTISSLQPEDFATYYCQQYSTVPWTFGQGTKV

SEQ ID NO: 108 - protein, 110 aa, Artificial; identical to SEQ ID NO: 101
  Bevacizumab light constant

SEQ ID NO: 109 - DNA, 2199 bp, Artificial
  Bevacizumab
atgtaccggatgcagctgctgagctgtatcgccctgtctctggccctggtcaccaattctgaggtgcagctggtggaatctggcggcggacttgttcaacctggcggctctctgagactgagctgtgccgcttctggctacaccttcaccaactacggcatgaactgggtccgacaggcccctggcaaaggccttgaatgggtcggatggatcaacacctacaccggcgagccaacatacgccgccgacttcaagcggagattcaccttcagcctggacaccagcaagagcaccgcctacctgcagatgaacagcctgagagccgaggacaccgccgtgtactactgcgccaagtatccccactactacggcagcagccactggtactttgacgtgtggggacagggcacactggtcacagtgtctagcgcctctacaaagggccccagcgttttcccactggctcctagcagcaagtctaccagcggaggaacagccgctctgggctgtctggtcaaggactactttcccgagcctgtgaccgtgtcctggaattctggcgctctgacaagcggcgtgcacacctttccagctgtgctgcaaagcagcggcctgtactctctgagcagcgtcgtgacagtgccaagcagctctctgggcacccagacctacatctgcaatgtgaaccacaagcctagcaacaccaaggtggacaagaaggtggaacccaagagctgcgacaagacccacacctgtcctccatgtcctgctccagaactgctcggcggaccttccgtgttcctgtttcctccaaagcctaaggacaccctgatgatcagcagaacccctgaagtgacctgcgtggtggtggatgtgtcccacgaggatcccgaagtgaagttcaattggtacgtggacggcgtggaagtgcacaacgccaagaccaagcctagagaggaacagtacaacagcacctacagagtggtgtccgtgctgaccgtgctgcaccaggattggctgaacggcaaagagtacaagtgcaaggtgtccaacaaggccctgcctgctcctatcgagaaaaccatcagcaaggccaagggccagcctagggaaccccaggtttacacactgcctccaagccgggaagagatgaccaagaaccaggtgtccctgacctgcctcgtgaagggcttctacccttccgatatcgccgtggaatgggagagcaatggccagccagagaacaactacaagacaacccctcctgtgctggacagcgacggctcattcttcctgtacagcaagctgacagtggacaagtccagatggcagcagggcaacgtgttcagctgcagcgtgatgcacgaggccctgcacaaccactacacccagaagtctctgagcctgtctcctggcaagcggaagagaagaggctctggcgaaggcagaggcagcctgcttacatgtggcgacgtggaagagaaccccggacctatgtatagaatgcagctcctgtcctgcattgccctgagcctggctctcgtgaccaacagcgacatccagatgacacagagccccagcagcctgtctgcctctgtgggagacagagtgaccatcacctgtagcgccagccaggacatctccaactacctgaactggtatcagcaaaagcccggcaaggcccctaaggtgctgatctacttcacaagcagcctgcactccggcgtgcccagcagattttctggctctggcagcggcaccgacttcaccctgaccatatctagcctgcagcctgaggacttcgccacctactactgccagcagtacagcaccgtgccttggacatttggccagggcacaaaggtggaaatcaagcggactgtggccgctcctagcgtgttcatctttccacctagcgacgagcagctgaagtctggcacagcctctgtcgtgtgcctgctgaacaacttctaccccagagaagccaaggtgcagtggaaagtggacaatgccctgcagagcggcaacagccaagagagcgtgacagagcaggactccaaggatagcacctatagcctgagcagcaccctgacactgagcaaggccgactacgagaagcacaaagtgtacgcctgcgaagtgacccaccagggcctttctagccctgtgaccaagagcttcaaccggggcgaatgttaa

SEQ ID NO: 110 - protein, 451 aa, Artificial
  Aflibercept
MYRMQLLSCIALSLALVTNSSDTGRPFVEMYSEIPEIIHMTEGRELVIPCRVTSPNITVTLKKFPLDTLIPDGKRIIWDSRKGFIISNATYKEIGLLTCEATVNGHLYKTNYLTHRQTNTIIDVVLSPSHGIELSVGEKLVLNCTARTELNVGIDFNWEYPSSKHQHKKLVNRDLKTQSGSEMKKFLSTLTIDGVTRSDQGLYTCAASSGLMTKKNSTFVRVHEKDKTHTCPPCPAPELLGGPSVFLFPPKPKDTLMISRTPEVTCVVVDVSHEDPEVKFNWYVDGVEVHNAKTKPREEQYNSTYRVVSVLTVLHQDWLNGKEYKCKVSNKALPAPIEKTISKAKGQPREPQVYTLPPSRDELTKNQVSLTCLVKGFYPSDIAVEWESNGQPENNYKTTPPVLDSDGSFFLYSKLTVDKSRWQQGNVFSCSVMHEALHNHYTQKSLSLSPG

SEQ ID NO: 111 - protein, 104 aa, Homo sapiens
SDTGRPFVEMYSEIPEIIHMTEGRELVIPCRVTSPNITVTLKKFPLDTLIPDGKRIIWDSRKGFIISNATYKEIGLLTCEATVNGHLYKTNYLTHRQTNTIIDV

SEQ ID NO: 112 - protein, 101 aa, Homo sapiens
VLSPSHGIELSVGEKLVLNCTARTELNVGIDFNWEYPSSKHQHKKLVNRDLKTQSGSEMKKFLSTLTIDGVTRSDQGLYTCAASSGLMTKKNSTFVRVHEK

SEQ ID NO: 113 - protein, 226 aa, Homo sapiens
DKTHTCPPCPAPELLGGPSVFLFPPKPKDTLMISRTPEVTCVVVDVSHEDPEVKFNWYVDGVEVHNAKTKPREEQYNSTYRVVSVLTVLHQDWLNGKEYKCKVSNKALPAPIEKTISKAKGQPREPQVYTLPPSRDELTKNQVSLTCLVKGFYPSDIAVEWESNGQPENNYKTTPPVLDSDGSFFLYSKLTVDKSRWQQGNVFSCSVMHEALHNHYTQKSLSLSPG

SEQ ID NO: 114 - DNA, 1542 bp, Artificial
  Aflibercept
atgtaccgaatgcagctgctgctgctgatcgcactgagcctggcactggtgaccaacagcgaggtgcagctggtggagagcggaggaggactggtgcagccaggaggaagcctgcgactgagctgtgcagcaagcggatacgacttcacccattacggaatgaactgggtgcgacaggcaccaggaaagggactggagtgggtgggatggatcaacacctacaccggagagccaacctacgcagcagacttcaagcgacgattcaccttcagcctggacaccagcaagagcaccgcatacctgcagatgaacagcctgcgagcagaggacaccgcagtgtactactgtgcaaagtacccatactactacggaaccagccattggtacttcgacgtgtggggacagggaaccctggtgaccgtgagcagcgcaagcaccaagggaccaagcgtgttcccactggcaccaagcagcaagagcaccagcggaggaaccgcagcactgggatgtctggtgaaggactacttcccagagccagtgaccgtgagctggaacagcggagcactgaccagcggagtgcataccttcccagcagtgctgcagagcagcggactgtacagcctgagcagcgtggtgaccgtgccaagcagcagcctgggaacccagacctacatctgtaacgtgaaccataagccaagcaacaccaaggtggacaagaaggtggagccaaagagctgtgacaagacccatctgcgaaagcgacgagcaccagtgaagcagaccctgaacttcgacctgctgaagctggcaggagacgtggagagcaacccaggaccaatgtaccgaatgcagctgctgctgctgatcgcactgagcctggcactggtgaccaacagcgacatccagctgacccagagcccaagcagcctgagcgcaagcgtgggagaccgagtgaccatcacctgtagcgcaagccaggacatcagcaactacctgaactggtaccagcagaagccaggaaaggcaccaaaggtgctgatctacttcaccagcagcctgcatagcggagtgccaagccgattcagcggaagcggaagcggaaccgacttcaccctgaccatcagcagcctgcagccagaggacttcgcaacctactactgtcagcagtacagcaccgtgccatggaccttcggacagggaaccaaggtggagatcaagcgaaccgtggcagcaccaagcgtgttcatcttcccaccaagcgacgagcagctgaagagcggaaccgcaagcgtggtgtgtctgctgaacaacttctacccacgagaggcaaaggtgcagtggaaggtggacaacgcactgcagagcggaaacagccaggagagcgtgaccgagcaggacagcaaggacagcacctacagcctgagcagcaccctgaccctgagcaaggcagactacgagaagcataaggtgtacgcatgtgaggtgacccatcagggactgagcagcccagtgaccaagagcttcaaccgaggagagtgttga

What is claimed is:

1. A composition comprising at least two different nucleic acid vectors, wherein:
each of the at least two different adeno-associated virus (AAV) vectors comprises a coding sequence that encodes a different portion of a supporting cell target protein, each of the encoded portions being at least 30 amino acid residues in length, wherein the amino acid sequence of each of the encoded portions may optionally partially overlap with the amino acid sequence of a different one of the encoded portions;
no single vector of the at least two different vectors encodes the full-length supporting cell target protein;
at least one of the coding sequences comprises a nucleotide sequence spanning two neighboring exons of the supporting cell target genomic DNA, and lacks an intronic sequence between the two neighboring exons; and
when introduced into a primate cell the at least two different vectors undergo concatamerization or homologous recombination with each other, thereby forming a recombined nucleic acid that encodes a full-length supporting cell target protein.

2. The composition of claim 1, wherein the amino acid sequence of one of the encoded portions overlaps with the amino acid sequence of a different one of the encoded portions.

3. The composition of claim 2, wherein the amino acid sequence of each of the encoded portions partially overlaps with the amino acid sequence of a different encoded portion.

4. The composition of claim 2, wherein the overlapping amino acid sequence is between 30 amino acid residues to about 390 amino acid residues in length.

5. The composition of any one of claims 1-4, wherein each of the at least two different vectors comprises a different segment of an intron, wherein the intron comprises the nucleotide sequence of an intron that is present in a supporting cell target genomic DNA, and wherein the two different segments overlap in sequence by at least 100 nucleotides.

6. The composition of claim 5, wherein the two different segments overlap in sequence by about 30 nucleotides to about 390 nucleotides.

7. The composition of any one of claims 1-6, wherein the nucleotide sequence of each of the at least two different vectors is between about 30 nucleotides to about 390 nucleotides in length.

8. The composition of claim 7, wherein the nucleotide sequence of each of the at least two different vectors is between 30 nucleotides to 340 nucleotides in length.

9. The composition of any one of claims 1-8, wherein the number of different vectors in the composition is two.

10. The composition of claim 9, wherein a first of the two different vectors comprises a coding sequence that encodes an N-terminal portion of the supporting cell target protein.

11. The composition of claim 10, wherein the N-terminal portion of the supporting cell target protein is between about 30 amino acids to about 390 amino acids in length.

12. The composition of claim 11, wherein the N-terminal portion of the supporting cell target protein is between about 30 amino acids to about 340 amino acids in length.

13. The composition of any one of claims 10-12, wherein the first vector further comprises one or both of a promoter and a Kozak sequence.

14. The composition of claim 13, wherein the first vector comprises a promoter that is an inducible promoter, a constitutive promoter, or a tissue-specific promoter.

15. The composition of any one of claims 10-14, wherein the second of the two different vectors comprises a coding sequence that encodes a C-terminal portion of the supporting cell target protein.

16. The composition of claim 15, wherein the C-terminal portion of the supporting cell target protein is between 30 amino acids to about 390 amino acids in length.

17. The composition of claim 16, wherein the C-terminal portion of the supporting cell target protein is between 30 amino acids to about 340 amino acids in length.

18. The composition of any one of claims 15-17, wherein the second vector further comprises a poly(dA) sequence.

19. A composition comprising two different nucleic acid vectors, wherein:
a first nucleic acid vector of the two different nucleic acid vectors comprises a promoter, a first coding sequence that encodes an N-terminal portion of a supporting cell target protein positioned 3′ of the promoter, and a splicing donor signal sequence positioned at the 3′ end of the first coding sequence; and
a second nucleic acid vector of the two different nucleic acid vectors comprises a splicing acceptor signal sequence, a second coding sequence that encodes a C-terminal portion of a supporting cell target protein positioned at the 3′ end of the splicing acceptor signal sequence, and a polyadenylation sequence at the 3′ end of the second coding sequence;
wherein each of the encoded portions is at least 30 amino acid residues in length, wherein the amino acid sequences of the encoded portions do not overlap, wherein no single vector of the two different vectors encodes the full-length supporting cell target protein, and, when the coding sequences are transcribed in a primate cell, to produce RNA transcripts, splicing occurs between the splicing donor signal sequence on one transcript and the splicing acceptor signal sequence on the other transcript, thereby forming a recombined RNA molecule that encodes a full-length supporting cell target protein.

20. The composition of claim 19, wherein at least one of the coding sequences comprises a nucleotide sequence spanning two neighboring exons of a supporting cell target genomic DNA, and lacks an intronic sequence between the neighboring exons.

21. A composition comprising:
a first nucleic acid vector comprising a promoter, a first coding sequence that encodes an N-terminal portion of a supporting cell target protein positioned 3′ of the promoter, a splicing donor signal sequence positioned at the 3′ end of the first coding sequence, and a first detectable marker gene positioned 3′ of the splicing donor signal sequence; and
a second nucleic acid vector, different from the first nucleic acid vector, comprising a second detectable marker gene, a splicing acceptor signal sequence positioned 3′ of the second detectable marker gene, a second coding sequence that encodes a C-terminal portion of a supporting cell target protein positioned at the 3′ end of the splicing acceptor signal sequence, and a polyadenylation sequence positioned at the 3′ end of the second coding sequence;
wherein each of the encoded portions is at least 30 amino acid residues in length, wherein the respective amino acid sequences of the encoded portions do not overlap with each other, wherein no single vector of the two different vectors encodes the full-length supporting cell target protein, and, when the coding sequences are transcribed in a primate cell to produce RNA transcripts, splicing occurs between the splicing donor signal on one transcript and the splicing acceptor signal on the other transcript, thereby forming a recombined RNA molecule that encodes a full-length supporting cell target protein.

22. The composition of claim 21, wherein at least one of the coding sequences comprises a nucleotide sequence spanning two neighboring exons of a supporting cell target genomic DNA, and lacks an intronic sequence between the neighboring exons.

23. The composition of claim 21, wherein the first or second detectable marker gene is alkaline phosphatase.

24. The composition of claim 21 or 23, wherein the first and second detectable marker genes are the same.

25. A composition comprising:
a first nucleic acid vector comprising a promoter, a first coding sequence that encodes an N-terminal portion of a supporting cell target protein positioned 3′ to the promoter, a splicing donor signal sequence positioned at the 3′ end of the first coding sequence, and a F1 phage recombinogenic region positioned 3′ to the splicing donor signal sequence; and
a second nucleic acid vector, different from the first nucleic acid vector, comprising a second F1 phage recombinogenic region, a splicing acceptor signal sequence positioned 3′ of the second F1 phage recombinogenic region, a second coding sequence that encodes a C-terminal portion of a supporting cell target protein positioned at the 3′ end of the splicing acceptor signal sequence, and a polyadenylation sequence positioned at the 3′ end of the second coding sequence;
wherein each of the encoded portions is at least 30 amino acid residues in length, wherein the respective amino acid sequences of the encoded portions do not overlap with each other, wherein no single vector of the two different vectors encodes the full-length supporting cell target protein, and, when the coding sequences are transcribed in a primate cell to produce RNA transcripts, splicing occurs between the splicing donor signal one transcript and the splicing acceptor signal on the other transcript, thereby forming a recombined RNA molecule that encodes a full-length supporting cell target protein.

26. The composition of claim 25, wherein at least one of the coding sequences comprises a nucleotide sequence spanning two neighboring exons of a supporting cell target genomic DNA, and lacks an intronic sequence between the two neighboring exons.

27. A composition comprising a single adeno-associated virus (AAV) vector, wherein the single AAV vector that comprises a nucleic acid sequence that encodes a supporting cell target protein; and
when introduced into a primate cell, a nucleic acid encoding a full-length supporting cell target protein is generated at the locus of the supporting cell target gene, and the primate expresses the supporting cell target protein.

28. The composition of any one of claims 1-27, wherein the supporting cell target gene is gap junction protein beta 2 (GJB2).

29. The composition of any one of claims 1-27, wherein the supporting cell target gene is solute carrier family 26 member 4 (SLC26A4).

30. A composition comprising at least two different nucleic acid vectors, wherein:
each of the at least two different adeno-associated virus (AAV) vectors comprises a coding sequence that encodes a different portion of a hair cell target protein, each of the encoded portions being at least 30 amino acid residues in length, wherein the amino acid sequence of each of the encoded portions may optionally partially overlap with the amino acid sequence of a different one of the encoded portions;
no single vector of the at least two different vectors encodes the full-length hair cell target protein;
at least one of the coding sequences comprises a nucleotide sequence spanning two neighboring exons of the hair cell target genomic DNA, and lacks an intronic sequence between the two neighboring exons; and
when introduced into a primate cell the at least two different vectors undergo concatamerization or homologous recombination with each other, thereby forming a recombined nucleic acid that encodes a full-length hair cell target protein.

31. The composition of claim 30, wherein the amino acid sequence of one of the encoded portions overlaps with the amino acid sequence of a different one of the encoded portions.

32. The composition of claim 31, wherein the amino acid sequence of each of the encoded portions partially overlaps with the amino acid sequence of a different encoded portion.

33. The composition of claim 31, wherein the overlapping amino acid sequence is between 30 amino acid residues to about 390 amino acid residues in length.

34. The composition of any one of claims 30-33, wherein each of the at least two different vectors comprises a different segment of an intron, wherein the intron comprises the nucleotide sequence of an intron that is present in a hair cell target genomic DNA, and wherein the two different segments overlap in sequence by at least 100 nucleotides.

35. The composition of claim 34, wherein the two different segments overlap in sequence by about 30 nucleotides to about 390 nucleotides.

36. The composition of any one of claims 30-35, wherein the nucleotide sequence of each of the at least two different vectors is between about 30 nucleotides to about 390 nucleotides in length.

37. The composition of claim 36, wherein the nucleotide sequence of each of the at least two different vectors is between 30 nucleotides to 340 nucleotides in length.

38. The composition of any one of claims 30-37, wherein the number of different vectors in the composition is two.

39. The composition of claim 38, wherein a first of the two different vectors comprises a coding sequence that encodes an N-terminal portion of the hair cell target protein.

40. The composition of claim 39, wherein the N-terminal portion of the hair cell target protein is between about 30 amino acids to about 390 amino acids in length.

41. The composition of claim 40, wherein the N-terminal portion of the hair cell target protein is between about 30 amino acids to about 340 amino acids in length.

42. The composition of any one of claims 39-41, wherein the first vector further comprises one or both of a promoter and a Kozak sequence.

43. The composition of claim 42, wherein the first vector comprises a promoter that is an inducible promoter, a constitutive promoter, or a tissue-specific promoter.

44. The composition of any one of claims 39-41, wherein the second of the two different vectors comprises a coding sequence that encodes a C-terminal portion of the hair cell target protein.

45. The composition of claim 44, wherein the C-terminal portion of the hair cell target protein is between 30 amino acids to about 390 amino acids in length.

46. The composition of claim 45, wherein the C-terminal portion of the hair cell target protein is between 30 amino acids to about 340 amino acids in length.

47. The composition of any one of claims 44-46, wherein the second vector further comprises a poly(dA) sequence.

48. A composition comprising two different nucleic acid vectors, wherein:
a first nucleic acid vector of the two different nucleic acid vectors comprises a promoter, a first coding sequence that encodes an N-terminal portion of a hair cell target protein positioned 3′ of the promoter, and a splicing donor signal sequence positioned at the 3′ end of the first coding sequence; and
a second nucleic acid vector of the two different nucleic acid vectors comprises a splicing acceptor signal sequence, a second coding sequence that encodes a C-terminal portion of a hair cell target protein positioned at the 3′ end of the splicing acceptor signal sequence, and a polyadenylation sequence at the 3′ end of the second coding sequence;
wherein each of the encoded portions is at least 30 amino acid residues in length, wherein the amino acid sequences of the encoded portions do not overlap, wherein no single vector of the two different vectors encodes the full-length hair cell target protein, and, when the coding sequences are transcribed in a primate cell, to produce RNA transcripts, splicing occurs between the splicing donor signal sequence on one transcript and the splicing acceptor signal sequence on the other transcript, thereby forming a recombined RNA molecule that encodes a full-length hair cell target protein.

49. The composition of claim 48, wherein at least one of the coding sequences comprises a nucleotide sequence spanning two neighboring exons of a hair cell target genomic DNA, and lacks an intronic sequence between the neighboring exons.

50. A composition comprising:
a first nucleic acid vector comprising a promoter, a first coding sequence that encodes an N-terminal portion of a hair cell target protein positioned 3′ of the promoter, a splicing donor signal sequence positioned at the 3′ end of the first coding sequence, and a first detectable marker gene positioned 3′ of the splicing donor signal sequence; and
a second nucleic acid vector, different from the first nucleic acid vector, comprising a second detectable marker gene, a splicing acceptor signal sequence positioned 3′ of the second detectable marker gene, a second coding sequence that encodes a C-terminal portion of a hair cell target protein positioned at the 3′ end of the splicing acceptor signal sequence, and a polyadenylation sequence positioned at the 3′ end of the second coding sequence;
wherein each of the encoded portions is at least 30 amino acid residues in length, wherein the respective amino acid sequences of the encoded portions do not overlap with each other, wherein no single vector of the two different vectors encodes the full-length hair cell target protein, and, when the coding sequences are transcribed in a primate cell to produce RNA transcripts, splicing occurs between the splicing donor signal on one transcript and the splicing acceptor signal on the other transcript, thereby forming a recombined RNA molecule that encodes a full-length hair cell target protein.

51. The composition of claim 50, wherein at least one of the coding sequences comprises a nucleotide sequence spanning two neighboring exons of a hair cell target genomic DNA, and lacks an intronic sequence between the neighboring exons.

52. The composition of claim 50, wherein the first or second detectable marker gene is alkaline phosphatase.

53. The composition of claim 50 or 52, wherein the first and second detectable marker genes are the same.

54. A composition comprising:
a first nucleic acid vector comprising a promoter, a first coding sequence that encodes an N-terminal portion of a hair cell target protein positioned 3′ to the promoter, a splicing donor signal sequence positioned at the 3′ end of the first coding sequence, and a F1 phage recombinogenic region positioned 3′ to the splicing donor signal sequence; and
a second nucleic acid vector, different from the first nucleic acid vector, comprising a second F1 phage recombinogenic region, a splicing acceptor signal sequence positioned 3′ of the second F1 phage recombinogenic region, a second coding sequence that encodes a C-terminal portion of a hair cell target protein positioned at the 3′ end of the splicing acceptor signal sequence, and a polyadenylation sequence positioned at the 3′ end of the second coding sequence;
wherein each of the encoded portions is at least 30 amino acid residues in length, wherein the respective amino acid sequences of the encoded portions do not overlap with each other, wherein no single vector of the two different vectors encodes the full-length hair cell target protein, and, when the coding sequences are transcribed in a primate cell to produce RNA transcripts, splicing occurs between the splicing donor signal one transcript and the splicing acceptor signal on the other transcript, thereby forming a recombined RNA molecule that encodes a full-length hair cell target protein.

55. The composition of claim 54, wherein at least one of the coding sequences comprises a nucleotide sequence spanning two neighboring exons of a hair cell target genomic DNA, and lacks an intronic sequence between the two neighboring exons.

56. The composition of any one of claims 30-55, wherein the hair cell target gene is an OTOF gene, a TRIOBP gene, or a STRC gene.

57. A composition comprising a single adeno-associated virus (AAV) vector, wherein the single AAV vector that comprises a nucleic acid sequence that encodes a hair cell target protein; and
when introduced into a primate cell, a nucleic acid encoding a full-length hair cell target protein is generated at the locus of the hair cell target gene, and the primate expresses the hair cell target protein.

58. The composition of claim 57, wherein the hair cell target gene is a PJVK gene, an OTOF gene, a NDP gene, a CLRN1 gene, a TRIOBP gene, a STRC gene, a TMC1 gene, a VEGF gene or a HSPA1A gene.

59. The composition of any one of claims 1-58, further comprising a pharmaceutically acceptable excipient.

60. A kit comprising a composition of any one of claims 1-59.

61. A kit of claim 60, further comprising a pre-loaded syringe comprising the composition.

62. A method of correcting a supporting cell target gene defect in a supporting cell of an inner ear in a primate, the method comprising:
administering to the inner ear of the primate a therapeutically effective amount of a composition of any one of claims 1-29,
wherein the administering repairs the supporting cell target gene defect in the supporting cell of the inner ear of the primate.

63. A method of increasing the expression level of a supporting cell target protein in a supporting cell of an inner ear of a primate, the method comprising administering to the inner ear of the primate a therapeutically effective amount of a composition of any one of claims 1-29,
wherein the administering results in an increase in the expression level of the supporting cell target protein in the supporting cell of the inner ear of the primate.

64. The method of claim 63, wherein the primate has previously been determined to have a defective supporting cell target gene.

65. A method of treating non-syndromic sensorineural hearing loss in a primate identified as having a defective supporting cell target gene, the method comprising:
administering to the inner ear of the primate a therapeutically effective amount of a composition of any one of claims 1-29.

66. The method of claim 65, further comprising, prior to the administering step, determining that the primate has a defective supporting cell target gene.

67. A method of restoring hearing in a primate identified or diagnosed as having hearing loss, the method comprising:
administering to the inner ear of the primate a therapeutically effective amount of a composition of any one of claims 1-29.

68. The method of claim 67, further comprising, prior to the administering step, determining that the primate has a defective supporting cell target gene.

69. A method of restoring synapses and/or preserving spiral ganglion nerves in a primate identified or diagnosed as having an inner ear disorder, the method comprising:
administering to the inner ear of the primate a therapeutically effective amount of a composition of any one of claims 1-29.

70. The method of claim 69, further comprising, prior to the administering step, determining that the primate has a defective supporting cell target gene.

71. A method comprising administering to an inner ear of a primate a therapeutically effective amount of a composition of any one of claims 1-29.

72. The method of claim 71, wherein the primate has been previously identified as having a defective supporting cell target gene.

73. A method of correcting a hair cell target gene defect in a hair cell of an inner ear in a primate, the method comprising:
administering to the inner ear of the primate a therapeutically effective amount of a composition of any one of claims 30-59,
wherein the administering repairs the hair cell target gene defect in the hair cell of the inner ear of the primate.

74. A method of increasing the expression level of a hair cell target protein in a hair cell of an inner ear of a primate, the method comprising administering to the inner ear of the primate a therapeutically effective amount of a composition of any one of claims 30-59,
wherein the administering results in an increase in the expression level of the hair cell target protein in the hair cell of the inner ear of the primate.

75. The method of claim 74, wherein the primate has previously been determined to have a defective hair cell target gene.

76. A method of treating non-syndromic sensorineural hearing loss in a primate identified as having a defective hair cell target gene, the method comprising:
administering to the inner ear of the primate a therapeutically effective amount of a composition of any one of claims 30-59.

77. The method of claim 76, further comprising, prior to the administering step, determining that the primate has a defective hair cell target gene.

78. A method of restoring hearing in a primate identified or diagnosed as having hearing loss, the method comprising:
administering to the inner ear of the primate a therapeutically effective amount of a composition of any one of claims 30-59.

79. The method of claim 78, further comprising, prior to the administering step, determining that the primate has a defective hair cell target gene.

80. A method of restoring synapses and/or preserving spiral ganglion nerves in a primate identified or diagnosed as having an inner ear disorder, the method comprising:
administering to the inner ear of the primate a therapeutically effective amount of a composition of any one of claims 30-59.

81. The method of claim 80, further comprising, prior to the administering step, determining that the primate has a defective hair cell target gene.

82. A method comprising administering to an inner ear of a primate a therapeutically effective amount of a composition of any one of claims 30-59.

83. The method of claim 82, wherein the primate has been previously identified as having a defective hair cell target gene.

84. The composition of any one of claim 1-26 or 30-56, wherein the second nucleic acid vector further comprises a destabilizing sequence.

85. The composition of claim 84, wherein the second nucleic acid vector further comprises a FKBP12 destabilizing sequence.

86. The composition of any one of claim 27-29 or 57-59, wherein the nucleic acid vector further comprises a destabilizing sequence.

87. The composition of claim 86, wherein the nucleic acid vector comprises a FKBP12 destabilizing sequence.
